(19) United States
(12) Patent Application Publication
(10) Pub. No.: US 2013/0142792 A1
(43) Pub. Date: Jun. 6, 2013

(54) RAGE Fusion Protein Compositions And Methods Of Use

(71) Applicants: Jeffrey C. Webster, Jamestown, NC (US); Gregory T. Bleck, Cross Plains, WI (US); Madan Katragadda, Bedford, MA (US); Manoj Rajadhyaksha, Colchester, CT (US); Bernard N. Violand, Wildwood, MO (US); Jo-Ann Wentland, Pawcatuck, CT (US); Linda Marie Rothlein, Greensboro, NC (US)

(72) Inventors: Robert Rothlein, Greensboro, NC (US); Jeffrey C. Webster, Jamestown, NC (US); Gregory T. Bleck, Cross Plains, WI (US); Madan Katragadda, Bedford, MA (US); Manoj Rajadhyaksha, Colchester, CT (US); Bernard N. Violand, Wildwood, MO (US); Jo-Ann Wentland, Pawcatuck, CT (US)

(21) Appl. No.: 13/062,395

(22) PCT Filed: Oct. 19, 2010
(86) PCT No.: PCT/US10/53157

§ 371 Date: Oct. 3, 2012

Related U.S. Application Data
(60) Provisional application No. 61/305,706, filed on Feb. 18, 2010.

(51) Int. Cl. C07K 14/705; C07K 16/00

(52) U.S. Cl. CPC C07K 14/70503; C07K 16/00
USPC 424/134.1; 530/387.3; 536/23.4; 435/320.1; 435/325; 435/361; 435/369; 435/354; 435/367; 435/352; 435/365; 435/370; 435/371

(57) ABSTRACT

Disclosed are fusion proteins comprising a RAGE polypeptide, wherein the RAGE polypeptide comprises a fragment of a mammalian wild type RAGE peptide and at least one point mutation in the RAGE polypeptide portion of the fusion protein relative to the wild type RAGE peptide. The point mutation may remove and/or alter a glycosylation site or an enzyme cleavage site. Also disclosed are nucleic acids encoding such proteins as well as methods of using such proteins for treating RAGE-mediated pathologies.

### CROSS REFERENCE TO RELATED APPLICATION

[0001] This application claims priority under 35 U.S.C. §119(e) to U.S. Provisional Patent Application No. 61/305,706, filed on Feb. 18, 2010 and claims priority under 35 U.S.C. 365(c) to International Application No. PCT/US2010/032270, filed Apr. 23, 2010. International Application No. PCT/US2010/032270, filed Apr. 23, 2010 claims priority under 35 U.S.C. §119(e) to U.S. Provisional Patent Application No. 61/305,706, filed on Feb. 18, 2010. The disclosures of U.S. Provisional Patent Application No. 61/305,706, and International Application No. PCT/US2010/032270 are incorporated by reference in their entireties herein.

### FIELD OF THE INVENTION

[0002] The present invention relates to fusion proteins comprising the receptor for advanced glycation end products (“RAGE”), nucleic acids encoding RAGE fusion proteins, and methods of using such proteins.

### BACKGROUND

[0003] Incubation of proteins or lipids with aldose sugars results in nonenzymatic glycation and oxidation of amino groups on proteins to form Amadori adducts. Over time, the adducts undergo additional rearrangements, dehydrations, and cross-linking with other proteins to form complexes known as advanced glycation end products (“AGEs”). Factors which promote formation of AGEs include delayed protein turnover (e.g. as in amyloidoses), accumulation of macromolecules having high lysine content, and high blood glucose levels (e.g. as in diabetes) (Hori et al., J. Biol. Chem. 270: 25752-761, (1995)). AGEs have been implicated in a variety of disorders including complications associated with diabetes and normal aging.

[0004] AGEs display specific and saturable binding to cell surface receptors on monocytes, macrophages, endothelial cells of the microvasculature, smooth muscle cells, mesengial cells, and neurons. The receptor for advanced glycation end products (“RAGE”) is a member of the immunoglobulin supergene family of molecules. The extracellular (N-terminal) domain of RAGE includes three immunoglobulin-type regions: one V (variable) type domain followed by two C-type (constant) domains (Neeper et al., J. Biol. Chem., 267:14998-15004 (1992); Schmidt et al., Circ. (Suppl.) 96#194 (1997)). A single transmembrane spanning domain and a short, highly charged cytosolic tail follow the extracellular domain. The N-terminal, extracellular domain can be isolated by proteolysis of RAGE or by molecular biological approaches to generate soluble RAGE (sRAGE) comprised of the V and C domains.

[0005] RAGE is expressed on multiple cell types including leukocytes, neurons, microglial cells and vascular endothelium (e.g., Hori et al., J. Biol. Chem., 270:25752-761 (1995)). Increased levels of RAGE are also found in aging tissues (Schleicher et al., J. Clin. Invest., 99 (3): 457-468 (1997)), and the diabetic retina, vasculature and kidney (Schmidt et al., Nature Med., 1:1002-1004 (1995)).

[0006] In addition to AGEs, other compounds can bind to and modulate RAGE. RAGE binds to multiple functionally and structurally diverse ligands including amyloid beta (Aβ), serum amyloid A (SAA), Advanced Glycation End products (AGEs), S100 (a proinflammatory member of the Calgranulin family), carboxymethyl lysine (CML), amphoterin and CD11b/CD18 (Bucciarelli et al., Cell Mol. Life Sci., 59:1117-128 (2002); Chavakis et al., Microbes Infect., 6:1219-1225 (2004); Kokkola et al., Scand. J. Immunol., 61:1-9 (2005); Schmidt et al., J. Clin. Invest., 108:949-955 (2001); Rocken et al., Am. J. Pathol., 162:1213-1220 (2003)).

[0007] Binding of ligands such as AGEs, S100/calgranulin, β-amyloid, CML (N^{ε}-Carboxymethyl lysine), and amphoterin to RAGE has been shown to modify expression of a variety of genes. These interactions may then initiate signal transduction mechanisms including p38 activation, p21ras, MAP kinases, Erk1-2 phosphorylation, and the activation of the transcriptional mediator of inflammatory signaling, NF-κB (Yeh et al., Diabetes, 50:1495-1504 (2001)). For example, in many cell types, interaction between RAGE and its ligands can generate oxidative stress, which thereby results in activation of the free radical sensitive transcription factor NF-κB, and the activation of NF-κB regulated genes, such as the cytokines IL-1β and TNF-α. Furthermore, RAGE expression is upregulated via NF-κB and shows increased expression at sites of inflammation or oxidative stress (Tanaka et al., J. Biol. Chem., 275:25781-25790 (2000)). Thus, an ascending and often detrimental spiral may be fueled by a positive feedback loop initiated by ligand binding.

[0008] Activation of RAGE in different tissues and organs can lead to a number of pathophysiological consequences. RAGE has been implicated in a variety of conditions including: acute and chronic inflammation (Hofmann et al., Cell 97:889-901 (1999)), the development of diabetic late complications such as increased vascular permeability (Wautier et al., J. Clin. Invest., 97:238-243 (1995)), nephropathy (Teillet et al., J. Am. Soc. Nephrol., 11:1488-1497 (2000)), arteriosclerosis (Vlassara et. al., The Finnish Medical Society DUODECIM, Ann. Med., 28:419-426 (1996)), and retinopathy (Hammes et al., Diabetologia, 42:603-607 (1999)). RAGE has also been implicated in Alzheimer's disease (Yan et al., Nature, 382:685-691 (1996)), and in tumor invasion and metastasis (Taguchi et al., Nature, 405:354-357 (2000)).

[0009] Despite the broad expression of RAGE and its apparent pleiotropic role in multiple diverse disease models, RAGE does not appear to be essential to normal development. For example, RAGE knockout mice are without an overt abnormal phenotype, suggesting that while RAGE can play a role in disease pathology when stimulated chronically, inhibition of RAGE does not appear to contribute to any unwanted acute phenotype (Liliensiek et al., J. Clin. Invest. 113:1641-50 (2004)).

[0010] Antagonizing binding of physiological ligands to RAGE may down-regulate the pathophysiological changes brought about by excessive concentrations of AGEs and other RAGE ligands. By reducing binding of endogenous ligands to RAGE, symptoms associated with RAGE-mediated disorders may be reduced. Soluble RAGE (sRAGE) is able to effectively antagonize the binding of RAGE ligands to RAGE. However, sRAGE can have a half-life when administered in vivo that may be too short to be therapeutically useful for one or more disorders.

[0011] Fusion proteins comprising a RAGE ligand domain linked to a second polypeptide may provide the ability to antagonize natural RAGE ligands, while having a half-life that is long enough to be therapeutically useful. Still, in certain embodiments, such fusion proteins may be modified by protein processing (e.g., glycosylation and/or enzyme mediated cleavage) during expression of the protein in large scale bioreactors. Such processing may reduce the half-life of the fusion protein as compared to molecules that are not modified in any manner. Thus, the compounds and methods of the present invention address the need to develop compounds that antagonize the binding of AGEs and other physiological ligands to the RAGE receptor where the compound has a desirable pharmacokinetic profile.

### SUMMARY

[0012] Embodiments of the present invention relate to fusion proteins comprising the receptor for advanced glycation end products (“RAGE”). In certain embodiments, the RAGE fusion proteins comprise RAGE proteins having at least one point mutation relative to wild type RAGE, and nucleic acid sequences encoding same. Yet other embodiments of the invention comprise optimized nucleic acid sequences and contructs for making the fusion proteins of the present invention, as well as compositions and methods of use of such RAGE fusion proteins for the treatment of disorders.

[0013] In certain embodiments, the present invention comprises a fusion protein comprising a Receptor for Advanced Glycation Endproducts (RAGE) polypeptide linked to an immunoglobulin polypeptide, wherein the RAGE polypeptide comprises a fragment of a mammalian RAGE having a ligand binding domain, and wherein the fusion protein has at least one mutation relative to the wild-type sequence in at least one of the RAGE polypeptide or the immunoglobulin polypeptide, wherein the mutation removes and/or alters at least one of a glycosylation site or an enzyme cleavage site. In some embodiments, the enzyme cleavage site is a furin cleavage site. In certain embodiments, the immunoglobulin polypeptide comprises a C_{H}2 domain or a fragment of a C_{H}2 domain. Also, in certain embodiments, at least a portion of the hinge region is not included in the C_{H}2 domain fragment. Also, in certain embodiments, the C_{H}2 domain is linked via its C-terminus to the N-terminus of a C_{H}3 domain of an immunoglobulin polypeptide.

[0014] For example, in some embodiments, the present invention provides a fusion protein comprising a RAGE polypeptide and an immunoglobulin polypeptide, wherein: a) the RAGE polypeptide comprises a fragment of a mammalian wild type RAGE peptide comprising a RAGE ligand binding domain, and wherein the RAGE polypeptide comprises a point mutation or mutations at one or more of residues relative to the wild type RAGE peptide to remove and/or alter at least one glycosylation site; and b) the immunoglobulin polypeptide comprises at least a fragment of a C_{H}2 domain. In an embodiment, at least a portion of the hinge region not included as part of the fragment of a C_{H}2 domain. In an embodiment, the glycosylation site that is removed and/or altered by the mutation is in the ligand binding domain of the RAGE polypeptide.

[0015] In other embodiments, the present invention provides a fusion protein comprising a RAGE polypeptide and an immunoglobulin polypeptide, wherein: a) the RAGE polypeptide comprises a fragment of a mammalian wild type RAGE peptide comprising a RAGE ligand binding domain, and wherein the RAGE polypeptide comprises a point mutation or mutations at one or more of residues relative to the wild type RAGE peptide to remove and/or alter an enzyme cleavage site; and b) the immunoglobulin polypeptide comprises at least a fragment of a C_{H}2 domain and a C_{H}3 domain of an immunoglobulin. In an embodiment, the fragment of a C_{H}2 domain does not include at least a portion of the hinge region. In certain embodiments, the enzyme cleavage site is a furin cleavage site.

[0016] In other embodiments, the present invention provides a fusion protein comprising a RAGE polypeptide and an immunoglobulin polypeptide, wherein: a) the RAGE polypeptide comprises a fragment of a mammalian wild type RAGE peptide comprising a RAGE ligand binding domain, and wherein the RAGE polypeptide comprises: i) a point mutation or mutations at one or more of residues relative to the wild type RAGE peptide to remove and/or alter at least one glycosylation site, and ii) a point mutation or mutations at one or more of residues relative to the wild type RAGE peptide to remove and/or alter a furin cleavage site; and b) the immunoglobulin polypeptide comprises at least a fragment of a C_{H}2 domain, and a C_{H}3 domain of an immunoglobulin. In an embodiment, the fragment of a C_{H}2 domain does not include at least a portion of the hinge region.

[0017] In another embodiment, the present invention comprises nucleic acids encoding the RAGE fusion proteins as described herein. Expression vectors comprising these nucleic acids, as well as host cells transfected with such vectors are also provided.

[0018] In other embodiments, the present invention comprises methods and compositions for treating a RAGE-mediated disorder in a subject. The method may comprise administering a RAGE fusion protein of the present invention to the subject. The composition may comprise a RAGE fusion protein of the present invention and a pharmaceutically acceptable carrier.

[0019] Various advantages may be associated with particular embodiments of the fusion protein of the present invention. In one embodiment, the RAGE fusion proteins of the present invention may have increased metabolic stability relative to wild type RAGE fusion protein (i.e., a RAGE fusion protein without one or more point mutations to remove and/or alter either a glycosylation site or an enzyme cleavage site). Also, the RAGE fusion proteins of the present invention may exhibit high-affinity (i.e., physiologically relevant) binding for RAGE ligands. In certain embodiments, the RAGE fusion proteins of the present invention may bind to RAGE ligands (e.g., S100b, amyloid-beta, carboxymethyl-lysine) with affinities in the high nanomolar to low micromolar range and with greater affinity than a similar wild type RAGE fusion protein. By binding with high affinity to physiological RAGE ligands, the RAGE fusion proteins of the present invention may be used to inhibit binding of endogenous ligands to RAGE, thereby providing a means to ameliorate RAGE-mediated diseases.

[0020] There are additional features of the invention which will be described hereinafter. It is to be understood that the invention is not limited in its application to the details set forth in the following claims, description and figures. The invention is capable of other embodiments and of being practiced or carried out in various ways.

### BRIEF DESCRIPTION OF THE FIGURES

[0021] Various features, aspects and advantages of the present invention will become more apparent with reference to the following figures.

[0022] FIG. 1 shows various RAGE sequences and immunoglobulin sequences in accordance with alternate embodiments of the present invention: Panel A, SEQ ID NO: 1, the amino acid sequence for human RAGE; and SEQ ID NO: 2, the amino acid sequence for human RAGE without the signal sequence of amino acids 1-22; Panel B, SEQ ID NO: 3, the amino acid sequence for human RAGE without the signal sequence of amino acids 1-23; Panel C, SEQ ID NO: 4, the amino acid sequence of human sRAGE; SEQ ID NO: 5, the amino acid sequence of human sRAGE without the signal sequence of amino acids 1-22, and SEQ ID NO: 6, the amino acid sequence of human sRAGE without the signal sequence of amino acids 1-23; Panel D, SEQ ID NO: 7, an amino acid sequence comprising the V-domain of human RAGE; SEQ ID NO: 8, an alternate amino acid sequence comprising the V-domain of human RAGE; SEQ ID NO: 9, an N-terminal fragment of the V-domain of human RAGE; SEQ ID NO: 10, an alternate N-terminal fragment of the V-domain of human RAGE; SEQ ID NO: 11, the amino acid sequence for amino acids 124-221 of human RAGE; SEQ ID NO: 12, the amino acid sequence for amino acids 227-317 of human RAGE; SEQ ID NO: 13, the amino acid sequence for amino acids 23-123 of human RAGE; Panel E, SEQ ID NO: 14, the amino acid sequence for amino acids 24-123 of human RAGE; SEQ ID NO: 15, the amino acid sequence for amino acids 23-136 of human RAGE; SEQ ID NO: 16, the amino acid sequence for amino acids 24-136 of human RAGE; SEQ ID NO: 17, the amino acid sequence for amino acids 23-226 of human RAGE; SEQ ID NO: 18, the amino acid sequence for amino acids 24-226 of human RAGE; Panel F, SEQ ID NO: 19, the amino acid sequence for amino acids 23-251 of human RAGE; SEQ ID NO: 20, the amino acid sequence for amino acids 24-251 of human RAGE; SEQ ID NO: 21, a RAGE interdomain linker; SEQ ID NO: 22, a second RAGE interdomain linker; SEQ ID NO: 23, a third RAGE interdomain linker; SEQ ID NO: 24, a fourth RAGE interdomain linker; Panel G, SEQ ID NO: 25, DNA encoding human RAGE amino acids 1-118; SEQ ID NO: 26, DNA encoding human RAGE amino acids 1-123; and SEQ ID NO: 27, DNA encoding human RAGE amino acids 1-136; Panel H, SEQ ID NO: 28, DNA encoding human RAGE amino acids 1-230; and SEQ ID NO: 29, DNA encoding human RAGE amino acids 1-251; Panel I, SEQ ID NO: 38, a partial amino acid sequence for the C_{H}2 and C_{H}3 domains of human IgG; SEQ ID NO:39, DNA encoding a portion of the human C_{H}2 and C_{H}3 domains of human IgG; SEQ ID NO: 40, an amino acid sequence for the C_{H}2 and C_{H}3 domains of human IgG; Panel J, SEQ ID NO: 41, a DNA encoding the human C_{H}2 and C_{H}3 domains of human IgG; SEQ ID NO: 42, an amino acid sequence for the C_{H}2 domain of human IgG; SEQ ID NO: 43, an amino acid sequence for the C_{H}3 domain of human IgG; and SEQ ID NO: 44, a fifth RAGE interdomain linker; Panel K, SEQ ID NO: 45, the amino acid sequence of human sRAGE without the signal sequence of amino acids 1-23 where the glutamine residue at the N-terminus has cyclized to form pyroglutamic acid, SEQ ID NO: 46, an alternate amino acid sequence comprising the V-domain of human sRAGE where the glutamine residue at the N-terminus has cyclized to form pyroglutamic acid, SEQ ID NO: 47, an alternate N-terminal fragment of the V-domain of human RAGE where the glutamine residue at the N-terminus has cyclized to form pyroglutamic acid, SEQ ID NO: 48, the amino acid sequence for amino acids 24-123 of human RAGE where the glutamine residue at the N-terminus has cyclized to form pyroglutamic acid; Panel L, SEQ ID NO: 49, the amino acid sequence for amino acids 24-136 of human RAGE where the glutamine residue at the N-terminus has cyclized to form pyroglutamic acid, SEQ ID NO: 50, the amino acid sequence for amino acids 24-226 of human RAGE where the glutamine residue at the N-terminus has cyclized to form pyroglutamic acid, SEQ ID NO: 51, the amino acid sequence for amino acids 24-251 of human RAGE where the glutamine residue at the N-terminus has cyclized to form pyroglutamic acid; Panel M, SEQ ID NO: 52, an alternate DNA sequence encoding a portion of the human C_{H}2 and C_{H}3 domains of human IgG in SEQ ID NO: 38, and SEQ ID NO: 53, an alternate DNA sequence encoding the human C_{H}2 and C_{H}3 domains of human IgG in SEQ ID NO: 40.

[0023] FIG. 2 shows alternate DNA sequences SEQ ID NO: 30 (Panel A) and SEQ ID NO: 54 (Panel B) that encode a first RAGE fusion protein (TTP-4000) coding region in accordance with an embodiment of the present invention. Coding sequence 1-753 highlighted in bold encodes RAGE N-terminal protein sequence whereas sequence 754-1386 encodes human IgG Fc (γ1) protein sequence without the hinge region.

[0024] FIG. 3 shows alternate DNA sequences SEQ ID NO: 31 (Panel A) and SEQ ID NO: 55 (Panel B) that encode a second RAGE fusion protein (TTP-3000) coding region in accordance with an embodiment of the present invention. Coding sequence 1-408 highlighted in bold encodes RAGE N-terminal protein sequence, whereas sequence 409-1041 codes human IgG Fc (γ1) protein sequence without the hinge region.

[0025] FIG. 4 shows the amino acid sequences, SEQ ID NO: 32, SEQ ID NO: 33, SEQ ID NO: 34, and SEQ ID NO: 56 that each encode a four domain RAGE fusion protein in accordance with alternate embodiments of the present invention. RAGE sequence is highlighted with bold font.

[0026] FIG. 5 shows the amino acid sequences, SEQ ID NO: 35, SEQ ID NO: 36, SEQ ID NO: 37, and SEQ ID NO: 57 that each encode a three domain RAGE fusion protein in accordance with alternate embodiments of the present invention. RAGE sequence is highlighted with bold font.

[0027] FIG. 6 shows various RAGE fusion proteins comprising RAGE polypeptide sequences and immunoglobulin polypeptide sequences in accordance with alternate embodiments of the present invention. The RAGE fusion proteins correspond to the amino acid sequence of the RAGE fusion protein of SEQ ID NO: 34 (TTP4000), wherein the signal sequence of amino acids 1-23 has been removed and the RAGE fusion protein comprises a point mutation or mutations to remove a glycosylation site and/or a furin cleavage site based on number that begins with amino acid 24 relative to the full-length wild-type RAGE sequence (SEQ ID NO: 1). The sequences are provided as follows: Panel A, SEQ ID NO: 62, the amino acid sequence for the TTP4000 RAGE fusion protein with an N2Q (i.e., corresponding to N25Q in the full-length wild-type sequence) point mutation; SEQ ID NO: 63, the amino acid sequence for the TTP4000 RAGE fusion protein with an N58Q point mutation (i.e., corresponding to N81Q in the full-length wild-type sequence); SEQ ID NO: 64, the amino acid sequence for the TTP4000 RAGE fusion protein with N2Q and N58Q point mutations; SEQ ID NO: 65, the amino acid sequence for the TTP4000 RAGE fusion protein with an R195A point mutation; Panel B, SEQ ID NO: 66, the amino acid sequence for the TTP4000 RAGE fusion protein with an R195K point mutation; SEQ ID NO: 67, the amino acid sequence for the TTP4000 RAGE fusion protein with an R198A point mutation; SEQ ID NO: 68, the amino acid sequence for the TTP4000 RAGE fusion protein with an R198K point mutation; SEQ ID NO: 69, the amino acid sequence for the TTP4000 RAGE fusion protein with an R198H point mutation; Panel C, SEQ ID NO: 70, the amino acid sequence for the TTP4000 RAGE fusion protein with an R198T point mutation; SEQ ID NO: 71, the amino acid sequence for the TTP4000 RAGE fusion protein with an N2Q and an R198A point mutation; SEQ ID NO: 72, the amino acid sequence for the TTP4000 RAGE fusion protein with N58Q and R198A point mutations; SEQ ID NO: 73, the amino acid sequence for the TTP4000 RAGE fusion protein with N2Q, N58Q, and R198A point mutations; Panel D, SEQ ID NO: 74, the amino acid sequence for the TTP4000 RAGE fusion protein with an N288Q point mutation; SEQ ID NO: 75, the amino acid sequence for the TTP4000 RAGE fusion protein with N2Q and N288Q point mutations, SEQ ID NO: 76, the amino acid sequence for the TTP4000 RAGE fusion protein with N58Q and N288Q point mutations; SEQ ID NO: 77, the amino acid sequence for the TTP4000 RAGE fusion protein with N2Q, N58Q, and N288Q point mutations; Panel E, SEQ ID NO: 78, the amino acid sequence for the TTP4000 RAGE fusion protein with N2Q, R198A, and N288Q point mutations; SEQ ID NO: 79, the amino acid sequence for the TTP4000 RAGE fusion protein with N58Q, R198A, and N288Q point mutations; SEQ ID NO: 80, the amino acid sequence for the TTP4000 RAGE fusion protein with N2Q, N58Q, R198A, and N288Q point mutations; and SEQ ID NO: 81, the amino acid sequence for the TTP4000 RAGE fusion protein with G59S, and R198A point mutations; Panels F through J show SEQ ID NOs: 92 through 111, which correspond to SEQ ID NOs: 62 through 81, respectively, with the exception that the C-terminal lysine has been removed; Panels K through O show SEQ ID NOs: 112 through 131, which correspond to SEQ ID NOs: 62 through 81, respectively, with the exception that there is an N-terminal pyroglutamic acid residue in place of a N-terminal glutamine residue; Panels P through T show SEQ ID NOs: 132 through 151, which correspond to SEQ ID NOs: 62 through 81, respectively, with the exception that the N-terminal glutamine has been removed; Panels U through Y show SEQ ID NOs: 152 through 171, which correspond to SEQ ID NOs: 132 through 151, respectively, with the exception that the C-terminal lysine has been removed; Panels Z through DD show SEQ ID NOs: 172 through 190 and also SEQ ID NO: 200, which correspond to SEQ ID NOs: 62 through 81, respectively, with the exception that there is an N-terminal pyroglutamic acid residue in place of a N-terminal glutamine residue and the C-terminal lysine has been removed; Panels EE-FF shows SEQ ID NOs: 58, 59, 60, 61, 82, and 201 which correspond to the amino acid sequence for the TTP4000 RAGE fusion protein (i.e., SEQ ID NO: 34) with N2Q, G59S, and R198A point mutations (SEQ ID NO: 58), and SEQ ID NO: 58 where the C-terminal lysine has been removed (SEQ ID NO: 59), SEQ ID NO: 58 with the exception that there is an N-terminal pyroglutamic acid residue in place of a N-terminal glutamine residue (SEQ ID NO: 60), SEQ ID NO: 58 with the exception that the N-terminal glutamine has been removed (SEQ ID NO: 61), SEQ ID NO: 61 where the C-terminal lysine has been removed (SEQ ID NO: 82), SEQ ID NO: 58 with the exception that there is an N-terminal pyroglutamic acid residue in place of a N-terminal glutamine residue and the C-terminal lysine has been removed (SEQ ID NO: 201); and SEQ ID NO: 225 corresponding to a RAGE fusion protein with one RAGE immunoglobulin domain and mutations at 3 glycosylation sites.

[0028] FIG. 7 shows alternate embodiments of DNA sequences encoding for the TTP4000 RAGE fusion protein of SEQ ID NO: 34 (TTP4000), wherein the RAGE fusion protein comprises a point mutation or mutations to remove a glycosylation site and/or a furin cleavage site: Panel A, SEQ ID NO: 221, a nucleotide sequence encoding for the TTP4000 RAGE fusion protein; Panel B, SEQ ID NO: 222, an alternate nucleotide sequence encoding for the TTP4000 RAGE fusion protein.

[0029] FIG. 8A shows the native amino acid signal sequence for human RAGE (SEQ ID NO: 83), as well as alternate embodiments of DNA sequences encoding for the native amino acid signal sequence for human RAGE (the native DNA signal sequence is SEQ ID NO: 84, a modified DNA signal sequence is SEQ ID NO: 85).

[0030] FIG. 8B shows various amino acid sequences for the immunoglobulin portion of the fusion protein. SEQ ID NO: 86 corresponds to SEQ ID NO: 38 with the exception that the C-terminal lysine has been removed; SEQ ID NO: 87 corresponds to SEQ ID NO: 40 with the exception that the C-terminal lysine has been removed; SEQ ID NO: 88 corresponds to SEQ ID NO: 40 with the exception that the first eleven N-terminal amino acids and a C-terminal lysine have been removed; SEQ ID NO: 89 corresponds to SEQ ID NO: 40 with the exception that the first eleven N-terminal amino acids have been removed, and that there is a point mutation from N to Q (shown in bold font); SEQ ID NO: 90 corresponds to SEQ ID NO: 42 with the exception that the first ten N-terminal amino acids have been removed; SEQ ID NO: 91 corresponds to SEQ ID NO: 42 with the exception that the first eleven N-terminal amino acids have been removed.

[0031] FIG. 8C—SEQ ID NO: 191 corresponds to SEQ ID NO: 46 with the exception of a N2Q point mutation; SEQ ID NO: 192 corresponds to SEQ ID NO: 46 with the exception of N2Q and N58Q point mutations; SEQ ID NO: 193 corresponds to SEQ ID NO: 46 with the exception a N58Q point mutation; SEQ ID NO: 194 corresponds to SEQ ID NO: 47 with the exception of a N2Q point mutation; SEQ ID NO: 195 corresponds to SEQ ID NO: 47 with the exception of a N2Q point mutation and the N-terminal pyroglutamic acid residue; SEQ ID NO: 196 forward primer sequence encoding mutation to remove glycosylation site in immunoglobulin polypeptide; SEQ ID NO: 197 reverse primer sequence with overlapping regions with SEQ ID NO: 196; SEQ ID NO: 198 forward primer sequence encoding mutation to remove furin cleavage site in RAGE polypeptide; SEQ ID NO: 199 reverse primer sequence with overlapping regions with SEQ ID NO: 198; SEQ ID NO: 223 corresponding to an 11 amino acid peptide comprising the hinge region of IgG1; and SEQ ID NO: 224 corresponding to a 10 amino acid peptide comprising the hinge region of IgG1.

[0032] FIG. 8D shows a nucleic acid sequence SEQ ID NO: 202 that can encode for the fusion proteins of SEQ ID NOS: 62, 92, 112, 132, 152, and 172.

[0033] FIG. 8E shows a nucleic acid sequence SEQ ID NO: 203 that can encode for the fusion proteins of SEQ ID NOS: 63, 93, 113, 133, 153, and 173.

[0034] FIG. 8F shows a nucleic acid sequence SEQ ID NO: 204 that can encode for the fusion proteins of SEQ ID NOS: 64, 94, 114, 134, 154, and 174.

[0035] FIG. 8G shows a nucleic acid sequence SEQ ID NO: 205 that can encode for the fusion proteins of SEQ ID NOS: 65, 95, 115, 135, 155, and 175.

[0036] FIG. 8H shows a nucleic acid sequence SEQ ID NO: 206 that can encode for the fusion proteins of SEQ ID NOS: 66, 96, 116, 136, 156, and 176.

[0037] FIG. 8I shows a nucleic acid sequence SEQ ID NO: 207 that can encode for the fusion proteins of SEQ ID NOS: 67, 97, 117, 137, 157, and 177.

[0038] FIG. 8J shows a nucleic acid sequence SEQ ID NO: 208 that can encode for the fusion proteins of SEQ ID NOS: 68, 98, 118, 138, 158, and 178.

[0039] FIG. 8K shows a nucleic acid sequence SEQ ID NO: 209 that can encode for the fusion proteins of SEQ ID NOS: 69, 99, 119, 139, 159, and 179.

[0040] FIG. 8L shows a nucleic acid sequence SEQ ID NO: 210 that can encode for the fusion proteins of SEQ ID NOS: 70, 100, 120, 140, 160, and 180.

[0041] FIG. 8M shows a nucleic acid sequence SEQ ID NO: 211 that can encode for the fusion proteins of SEQ ID NOS: 71, 101, 121, 141, 161, and 181.

[0042] FIG. 8N shows a nucleic acid sequence SEQ ID NO: 212 that can encode for the fusion proteins of SEQ ID NOS: 72, 102, 122, 142, 162, and 182.

[0043] FIG. 8O shows a nucleic acid sequence SEQ ID NO: 213 that can encode for the fusion proteins of SEQ ID NOS: 73, 103, 123, 143, 163, and 183.

[0044] FIG. 8P shows a nucleic acid sequence SEQ ID NO: 214 that can encode for the fusion proteins of SEQ ID NOS: 74, 104, 124, 144, 164, and 184.

[0045] FIG. 8Q shows a nucleic acid sequence SEQ ID NO: 215 that can encode for the fusion proteins of SEQ ID NOS: 75, 105, 125, 145, 165, and 185.

[0046] FIG. 8R shows a nucleic acid sequence SEQ ID NO: 216 that can encode for the fusion proteins of SEQ ID NOS: 76, 106, 126, 146, 166, and 186.

[0047] FIG. 8S shows a nucleic acid sequence SEQ ID NO: 217 that can encode for the fusion proteins of SEQ ID NOS: 77, 107, 127, 147, 167, and 187.

[0048] FIG. 8T shows a nucleic acid sequence SEQ ID NO: 219 that can encode for the fusion proteins of SEQ ID NOS: 78, 108, 128, 148, 168, and 188.

[0049] FIG. 8U shows a nucleic acid sequence SEQ ID NO: 219 that can encode for the fusion proteins of SEQ ID NOS: 79, 109, 129, 149, 169, and 189.

[0050] FIG. 8V shows a nucleic acid sequence SEQ ID NO: 220 that can encode for the fusion proteins of SEQ ID NOS: 80, 110, 130, 150, 170, and 190.

[0051] FIG. 9 shows differences in pharmacokinetic profiles for the RAGE fusion proteins of Batches 1-5 described herein. Plasma concentrations were measured over time periods from 0-336 hours (FIG. 9A) and 0-48 hours (FIG. 9B).

[0052] FIG. 10 shows mean pharmacokinetic parameters for the RAGE fusion proteins of Batches 1-5 described herein following intravenous administration to mice at 10 mg/kg.

[0053] FIG. 11 shows in vitro stability data for the RAGE fusion proteins of Batches 1-5 described below. FIG. 11A provides this data in tabular form, while FIG. 11B provides this data in graphic form.

[0054] FIG. 12 shows relative binding affinities for various mutant RAGE fusion proteins.

### DETAILED DESCRIPTION

[0055] Unless indicated to the contrary, the numerical parameters set forth in the following specification are approximations that can vary depending upon the desired properties sought to be obtained by the present invention. At the very least, and not as an attempt to limit the application of the doctrine of equivalents to the scope of the claims, each numerical parameter should at least be construed in light of the number of reported significant digits and by applying ordinary rounding techniques.

[0056] It is further noted that, as used in this specification, the singular forms “a,” “an,” and “the” include plural referents unless expressly and unequivocally limited to one referent. The term “or” is used interchangeably with the term “and/or” unless the context clearly indicates otherwise.

[0057] Also, the terms “portion” and “fragment” are used interchangeably to refer to parts of a polypeptide, nucleic acid, or other molecular construct.

[0058] “Polypeptide” and “protein” are used interchangeably herein to describe protein molecules that may comprise either partial or full-length proteins.

[0059] As is known in the art, “proteins”, “peptides,” “polypeptides” and “oligopeptides” are chains of amino acids (typically L-amino acids) whose alpha carbons are linked through peptide bonds formed by a condensation reaction between the carboxyl group of the alpha carbon of one amino acid and the amino group of the alpha carbon of another amino acid. Typically, the amino acids making up a protein are numbered in order, starting at the amino terminal residue and increasing in the direction toward the carboxy terminal residue of the protein.

[0060] The peptides, polypeptides and protein sequences disclosed herein use either the conventional 1 letter code, or the conventional 3 letter code for amino acids. For example, as used herein, the amino acids include the following non-limiting listing: glycine is represented as Gly or G; alanine represented as Ala or A; isoleucine represented as Ile or I; asparaginine represented as Asn or N; glutamine represented as Gln or Q; serine represented as Ser or S; threonine represented as Thr or T; protein represented as Pro or P; arginine represented as Arg or R; glutamate represented as Glu or E; lysine is represented as Lys or K; histidine is represented as His or H; leucine is represented as Leu or L; and pyroglutamic acid represented as pE.

[0061] As used herein, the term “upstream” refers to a residue that is N-terminal to a second residue where the molecule is a protein, or 5′ to a second residue where the molecule is a nucleic acid. Also as used herein, the term “downstream” refers to a residue that is C-terminal to a second residue where the molecule is a protein, or 3′ to a second residue where the molecule is a nucleic acid.

[0062] Unless defined otherwise, all technical and scientific terms used herein have the same meaning as commonly understood by one of ordinary skill in the art. Practitioners are particularly directed to Current Protocols in Molecular Biology (see e.g. Ausubel, F. M. et al., Short Protocols in Molecular Biology, 4^{th} Ed., Chapter 2, John Wiley & Sons, N.Y.) for definitions and terms of the art. Abbreviations for amino acid residues are the standard 3-letter and/or 1-letter codes used in the art to refer to one of the 20 common L-amino acids.

[0063] A “nucleic acid” is a polynucleotide such as deoxyribonucleic acid (DNA) or ribonucleic acid (RNA). The term is used to include single-stranded nucleic acids, double-stranded nucleic acids, and RNA and DNA made from nucleotide or nucleoside analogues.

[0064] The term “vector” refers to a nucleic acid molecule that may be used to transport a second nucleic acid molecule into a cell. In one embodiment, the vector allows for replication of DNA sequences inserted into the vector. The vector may comprise a promoter to enhance expression of the nucleic acid molecule in at least some host cells. Vectors may replicate autonomously (extrachromasomal) or may be integrated into a host cell chromosome. In one embodiment, the vector may comprise an expression vector capable of producing a protein derived from at least part of a nucleic acid sequence inserted into the vector.

[0065] As is known in the art, conditions for hybridizing nucleic acid sequences to each other can be described as ranging from low to high stringency. Generally, highly stringent hybridization conditions refer to washing hybrids in low salt buffer at high temperatures. Hybridization may be to filter bound DNA using hybridization solutions standard in the art such as 0.5M NaHPO₄, 7% sodium dodecyl sulfate (SDS), at 65° C., and washing in 0.25 M NaHPO₄, 3.5% SDS followed by washing 0.1×SSC/0.1% SDS at a temperature ranging from room temperature to 68° C. depending on the length of the probe. For example, a high stringency wash comprises washing in 6×SSC/0.05% sodium pyrophosphate at 37° C. for a 14 base oligonucleotide probe, or at 48° C. for a 17 base oligonucleotide probe, or at 55° C. for a 20 base oligonucleotide probe, or at 60° C. for a 25 base oligonucleotide probe, or at 65° C. for a nucleotide probe about 250 nucleotides in length. Nucleic acid probes may be labeled with radionucleotides by end-labeling with, for example, [γ-³²P]ATP, or incorporation of radiolabeled nucleotides such as [α-³²P]dCTP by random primer labeling. Alternatively, probes may be labeled by incorporation of biotinylated or fluorescein labeled nucleotides, and the probe detected using Streptavidin or anti-fluorescein antibodies.

[0066] As used herein, “small organic molecules” are molecules of molecular weight less than 2,000 Daltons that contain at least one carbon atom.

[0067] The term “fusion protein” refers to a protein or polypeptide that has an amino acid sequence derived from two or more proteins. The fusion protein may also include linking regions of amino acids between amino acid portions derived from separate proteins.

[0068] As used herein, “immunoglobulin peptides” may comprise an immunoglobulin heavy chain or a portion thereof. In one embodiment, the portion of the heavy chain may be the Fc fragment or a portion thereof. As used herein, the Fc fragment comprises the heavy chain hinge polypeptide, and the C_{H}2 and C_{H}3 domains of the heavy chain of an immunoglobulin, in either monomeric or dimeric form. Or, the C_{H}1 and Fc fragment may be used as the immunoglobulin polypeptide. The heavy chain (or portion thereof) or immunoglobulin polypeptide may be derived from or be a fragment of any one of the known heavy chain isotypes: e.g., IgG (γ), IgM (μ), IgD (δ), IgE (ε), or IgA (α). In addition, the heavy chain (or portion thereof) or immunoglobulin polypeptide may be derived from or be a fragment of any one of the known heavy chain subtypes: e.g., IgG1 (γ1), IgG2 (γ2), IgG3 (γ3), IgG4 (γ4), IgA1 (α1), IgA2 (α2), or mutations of these isotypes or subtypes that alter the biological activity. An example of biological activity that may be altered includes reduction of an isotype's ability to bind to some Fc receptors as for example, by modification of the hinge region.

[0069] The terms “identity” or “percent identical” refers to sequence identity between two amino acid sequences or between two nucleic acid sequences. Percent identity can be determined by aligning two sequences and refers to the number of identical residues (i.e., amino acid or nucleotide) at positions shared by the compared sequences. Sequence alignment and comparison may be conducted using the algorithms standard in the art (e.g. Smith and Waterman, 1981, Adv. Appl. Math. 2:482; Needleman and Wunsch, 1970, J. Mol. Biol. 48:443; Pearson and Lipman, 1988, Proc. Natl. Acad. Sci., USA, 85:2444) or by computerized versions of these algorithms (Wisconsin Genetics Software Package Release 7.0, Genetics Computer Group, 575 Science Drive, Madison, Wis.) publicly available as BLAST and FASTA. Also, ENTREZ, available through the National Institutes of Health, Bethesda Md., may be used for sequence comparison. In one embodiment, the percent identity of two sequences may be determined using GCG with a gap weight of 1, such that each amino acid gap is weighted as if it were a single amino acid mismatch between the two sequences.

[0070] As used herein, the term “conserved residues” refers to amino acids that are the same among a plurality of proteins having the same structure and/or function. A region of conserved residues may be important for protein structure or function. Thus, contiguous conserved residues as identified in a three-dimensional protein may be important for protein structure or function. To find conserved residues, or conserved regions of 3-D structure, a comparison of sequences for the same or similar proteins from different species, or of individuals of the same species, may be made.

[0071] As used herein, the term “homologue” means a polypeptide having a degree of homology or identity with the wild-type amino acid sequence. Homology comparisons can be conducted by eye, or more usually, with the aid of readily available sequence comparison programs. These commercially available computer programs can calculate percent homology between two or more sequences (e.g. Wilbur, W. J. and Lipman, D. J., 1983, Proc. Natl. Acad. Sci. USA, 80:726-730). For example, homologous sequences may be taken to include an amino acid sequences which in alternate embodiments are at least 70% identical, 75% identical, 85% identical, 90% identical, 95% identical, 96% identical, 97% identical, 98% identical, or 99% identical to each other.

[0072] As used herein, the term at least 90% identical thereto includes sequences that range from 90 to 99.99% identity to the indicated sequences and includes all ranges in between. Thus, the term at least 90% identical thereto includes sequences that are 91, 91.5, 92, 92.5, 93, 93.5, 94, 94.5, 95, 95.5, 96, 96.5, 97, 97.5, 98, 98.5, 99, 99.5 percent identical to the indicated sequence. Similarly the term at least 70% identical includes sequences that range from 70 to 99.99% identical, with all ranges in between. The determination of percent identity may be determined using the algorithms such as, but not limited to, those described herein.

[0073] As used herein, a polypeptide or protein “domain” comprises a region of a polypeptide or protein that comprises an independent unit. Domains may be defined in terms of structure, sequence and/or biological activity. In one embodiment, a polypeptide domain may comprise a region of a protein that folds in a manner that is substantially independent from the rest of the protein. Domains may be identified using domain databases such as, but not limited to PFAM, PRODOM, PROSITE, BLOCKS, PRINTS, SBASE, ISREC PROFILES, SAMRT, and PROCLASS.

[0074] As used herein, “immunoglobulin domain” is a sequence of amino acids that is structurally homologous, or identical to, a domain of an immunoglobulin. The length of the sequence of amino acids of an immunoglobulin domain may be any length. In one embodiment, an immunoglobulin domain may be less than 250 amino acids. In an example embodiment, an immunoglobulin domain may be about 80-150 amino acids in length. For example, the variable region, and the C_{H}1, C_{H}2, and C_{H}3 regions of an IgG are each immunoglobulin domains. In another example, the variable, the C_{H}1, C_{H}2, C_{H}3 and C_{H}4 regions of an IgM are each immunoglobulin domains.

[0075] As used herein, a “RAGE immunoglobulin domain” is a sequence of amino acids from RAGE protein that is structurally homologous, or identical to, a domain of an immunoglobulin. For example, a RAGE immunoglobulin domain may comprise the RAGE V-domain, the RAGE Ig-like C1-type 1 domain (“C1 domain”), or the RAGE Ig-like C2-type 2 domain (“C2 domain”).

[0076] As used herein, an “interdomain linker” comprises a polypeptide that joins two domains together. A hinge region is an example of an interdomain linker in an IgG.

[0077] As used herein, “directly linked” identifies a covalent linkage between two different groups (e.g., nucleic acid sequences, polypeptides, polypeptide domains) that does not have any intervening atoms between the two groups that are being linked.

[0078] As used herein, a “ligand binding domain” or “ligand binding site” comprises residues in a protein that directly interact with a ligand, or residues involved in positioning the ligand in close proximity to those residues that directly interact with the ligand. The interaction of residues in the ligand binding domain may be defined by the spatial proximity of the residues to a ligand in the model or structure. The term ligand binding domain includes homologues of a ligand binding domain, or portions thereof. In this regard, deliberate amino acid substitutions may be made in the ligand binding domain on the basis of similarity in polarity, charge, solubility, hydrophobicity, or hydrophilicity of the residues, as long as the binding specificity of the ligand binding domain is retained. A ligand binding domain may exist in one or more ligand binding domains of a protein or polypeptide.

[0079] As used herein, the term “interact” refers to a condition of proximity between a ligand or compound, or portions or fragments thereof, and a portion of a second molecule of interest. The interaction may be non-covalent, for example, as a result of hydrogen-bonding, van der Waals interactions, or electrostatic or hydrophobic interactions, or it may be covalent.

[0080] As used herein, a “ligand” refers to a molecule or compound or entity that interacts with a ligand binding domain, including substrates or analogues or parts thereof. As described herein, the term “ligand” may refer to compounds that bind to the protein of interest. A ligand may be an agonist, an antagonist, or a modulator. Or, a ligand may not have a biological effect. Or, a ligand may block the binding of other ligands thereby inhibiting a biological effect. Ligands may include, but are not limited to, small molecule inhibitors. These small molecules may include peptides, peptidomimetics, organic compounds and the like. Ligands may also include polypeptides and/or proteins.

[0081] As used herein, a “modulator compound” refers to a molecule which changes or alters the biological activity of a molecule of interest. A modulator compound may increase or decrease activity, or change the physical or chemical characteristics, or functional or immunological properties, of the molecule of interest. For RAGE, a modulator compound may increase or decrease activity, or change the characteristics, or functional or immunological properties of the RAGE, or a portion thereof. A modulator compound may include natural and/or chemically synthesized or artificial peptides, modified peptides (e.g., phosphopeptides), antibodies, carbohydrates, monosaccharides, oligosaccharides, polysaccharides, glycolipids, heterocyclic compounds, nucleosides or nucleotides or parts thereof, and small organic or inorganic molecules. A modulator compound may be an endogenous physiological compound or it may be a natural or synthetic compound. Or, the modulator compound may be a small organic molecule. The term “modulator compound” also includes a chemically modified ligand or compound, and includes isomers and racemic forms.

[0082] An “agonist” comprises a compound that binds to a receptor to form a complex that elicits a pharmacological response specific to the receptor involved.

[0083] An “antagonist” comprises a compound that binds to a biomolecule to form a complex that does not give rise to a substantial pharmacological response and can inhibit the biological response induced by an agonist. In some cases the biomolecule may be a receptor (e.g., RAGE). Also, in some cases the biomolecule may be an agonist, such that the antagonist may bind to the agonist and prevent the agonist from interacting with its target.

[0084] RAGE agonists may therefore bind to RAGE and stimulate RAGE-mediated cellular processes, and RAGE antagonists may inhibit RAGE-mediated processes from being stimulated by a RAGE agonist. For example, in one embodiment, the cellular process stimulated by RAGE agonists comprises activation of TNF-αt gene transcription.

[0085] The term “peptide mimetics” refers to structures that serve as substitutes for peptides in interactions between molecules (Morgan et al., 1989, Ann. Reports Med. Chem., 24:243-252). Peptide mimetics may include synthetic structures that may or may not contain amino acids and/or peptide bonds but that retain the structural and functional features of a peptide, or agonist, or antagonist. Peptide mimetics also include peptoids, oligopeptoids (Simon et al., 1972, Proc. Natl. Acad, Sci., USA, 89:9367); and peptide libraries containing peptides of a designed length representing all possible sequences of amino acids corresponding to a peptide, or agonist or antagonist of the invention.

[0086] The term “treating” or “treat” refers to improving a symptom of a disease or disorder or improving the subject's condition. The term “treatment” as used herein, refers to the full spectrum of treatments for a given disorder from which the subject is suffering, including alleviation of one symptom or most of the symptoms resulting from that disorder.

[0087] The term “cure” refers to the restoration of health in a subject, and/or the alleviation of all or substantially all of the symptoms of a disease or disorder in a subject.

[0088] The term “preventing the onset of a disorder” refers to impeding the development of the disorder in a subject that would have otherwise developed the disorder.

[0089] As used herein, the term “EC50” is defined as the concentration of an agent that results in 50% of a measured biological effect. For example, the EC50 of a therapeutic agent having a measurable biological effect may comprise the value at which the agent displays 50% of the biological effect.

[0090] As used herein, the term “IC50” is defined as the concentration of an agent that results in 50% inhibition of a measured effect. For example, the IC50 of an antagonist of RAGE binding may comprise the value at which the antagonist reduces ligand binding to the ligand binding domain of RAGE by 50%.

[0091] As used herein, the phrase “therapeutically effective amount” shall mean that amount of a drug or pharmaceutical agent that will elicit the therapeutic response of a subject that is being sought.

[0092] In these methods, factors which may influence what constitutes a therapeutically effective amount include, but are not limited to, the size and weight of the subject, the biodegradability of the therapeutic agent, the activity of the therapeutic agent, the size of the effected area, as well as its bioavailability. The phrase includes amounts which, as compared to a corresponding subject who has not received such amount, results in improved treatment, healing, or amelioration of a side effect, or a decrease in the rate of advancement of a disease or disorder.

[0093] The term “pharmaceutically acceptable carrier” as used herein may refer to compounds and compositions that are suitable for use in human or animal subjects, as for example, for therapeutic compositions administered for the treatment of a RAGE-mediated disorder or disease.

[0094] The term “pharmaceutical composition” is used herein to denote a composition that may be administered to a mammalian host, e.g., orally, parenterally, topically, by inhalation spray, intracerebroventricularly, intrathecally, intranasally, rectally, or any other form of administration route as described herein, in unit dosage formulations containing conventional non-toxic carriers, diluents, adjuvants, vehicles and the like.

[0095] The term “parenteral” as used herein, includes subcutaneous injections, intravenous, intramuscular, intracisternal injection, or infusion techniques.

[0096] As used herein “rejection” refers to the immune or inflammatory response on tissue that leads to destruction of cells, tissues or organs, or that leads to damage to cells, tissues, or organs. The rejected cells, tissue, or organ may be derived from the same subject that is mounting the rejection response, or may be transplanted from a different subject into the subject that is displaying rejection.

[0097] As used herein, the term “cell” refers to the structural and functional units of a mammalian living system that each comprise an independent living system. As is known in the art, cells include a nucleus, cytoplasm, intracellular organelles, and a cell wall which encloses the cell and allows the cell to be independent of other cells.

[0098] As used herein, the term “tissue” refers to an aggregate of cells that have a similar structure and function, or that work together to perform a particular function. A tissue may include a collection of similar cells and the intercellular substances surrounding the cells. Tissues include, but are not limited to, muscle tissue, nerve tissue, and bone.

[0099] As used herein an “organ” refers to a fully differentiated structural and functional unit in an animal that is specialized for some specific function. An organ may comprise a group of tissues that perform a specific function or group of functions. Organs include, but are not limited to, the heart, lungs, brain, eye, stomach, spleen, pancreas, kidneys, liver, intestines, skin, uterus, bladder, and bone.

[0100] A “stable” formulation is one in which the RAGE fusion protein therein essentially retains its physical and chemical stability and biological activity upon storage. Various analytical techniques for measuring protein stability are available in the art and are reviewed in Peptide and Protein Drug Delivery, 247-301, Vincent Lee Ed., Marcel Dekker, Inc., New York, N.Y., Pubs. (1991) and Jones, A. Adv. Drug Delivery Rev. 10: 29-90 (1993). Stability can be measured at a selected temperature for a selected time period. For rapid screening, the formulation may be kept at 40° C. for 1 week to 1 month, at which time stability is measured. For example, the extent of aggregation following lyophilization and storage can be used as an indicator of RAGE fusion protein stability. For example, a “stable” formulation may be one wherein less than about 10% and preferably less than about 5% of the RAGE fusion protein is present as an aggregate in the formulation. In other embodiments, an increase in aggregate formation following lyophilization and storage of the lyophilized formulation can be determined. For example, a “stable” lyophilized formulation may be one wherein the increase in aggregate in the lyophilized formulation is less than about 5% or less than about 3%, when the lyophilized formulation is incubated at 40° C. for at least one week. In other embodiments, stability of the RAGE fusion protein formulation may be measured using a biological activity assay such as a binding assay as described herein.

[0101] A “reconstituted” formulation is one which has been prepared by dissolving a lyophilized RAGE fusion protein formulation in a diluent such that the RAGE fusion protein is dispersed and/or dissolved in the reconstituted formulation. The reconstituted formulation may be suitable for administration (e.g. parenteral administration) to a patient to be treated with the fusion protein and, in certain embodiments of the invention, may be one which is suitable for subcutaneous administration.

[0102] By “isotonic” it is meant that the formulation of interest has an osmotic pressure from about 240 to about 340 mOsm/kg. In an embodiment, an isotonic formulation is one having an osmotic pressure that is essentially the same as human blood (285-310 mOsm/kg). Isotonicity can be measured using a vapor pressure or a freezing point depression type osmometer.

[0103] A “lyoprotectant” is a molecule which, when combined with a RAGE fusion protein, significantly prevents or reduces chemical and/or physical instability of the protein upon lyophilization and subsequent storage. Exemplary lyoprotectants include sugars such as sucrose or trehalose; a polyol such as sugar alcohols, e.g. erythritol, arabitol, xylitol, sorbitol, and mannitol; or combinations thereof. In an embodiment, the lyoprotectant may comprise a sugar. In another embodiment, the lyoprotectant may comprise a non-reducing sugar. In a further embodiment, the lyoprotectant may comprise a non-reducing sugar such as sucrose. The lyoprotectant may be added to the pre-lyophilized formulation in a “lyoprotecting amount” which means that, following lyophilization of the protein in the presence of the lyoprotecting amount of the lyoprotectant, the RAGE fusion protein essentially retains its physical and chemical stability and biological activity upon lyophilization and storage.

[0104] The “diluent” for a lyophilized formulation herein is one which is pharmaceutically acceptable (safe and non-toxic for administration to a human) and is useful for the preparation of a reconstituted formulation. Exemplary diluents include sterile water, bacteriostatic water for injection (BWFI), a pH buffered solution (e.g. phosphate-buffered saline), sterile saline solution, Ringer's solution or dextrose solution. In an embodiment, the diluent provides a reconstituted formulation suitable for injection. In another embodiment, where the diluent provides a reconstituted formulation suitable for injection, the diluent may comprise water for injection (WFI).

[0105] A “preservative” for a reconstituted formulation is a compound which can be added to the diluent or to the reconstituted formulation to essentially reduce bacterial action in the reconstituted formulation. In an embodiment, the amount of preservative may be added in an amount useful to facilitate the production of a multi-use reconstituted formulation. Examples of potential preservatives include octadecyldimethylbenzyl ammonium chloride, hexamethonium chloride, benzalkonium chloride (a mixture of alkylbenzyldimethylammonium chlorides in which the alkyl groups are long-chain compounds), and benzethonium chloride. Other types of preservatives include aromatic alcohols such as phenol, butyl and benzyl alcohol, allyl parabens such as methyl or propyl paraben, catechol, resorcinol, cyclohexanol, 3-pentanol, and m-cresol.

[0106] A “bulking agent” for a lyophilized formulation is a compound which adds mass to the lyophilized mixture and contributes to the physical structure of the lyophilized cake (e.g. facilitates the production of an essentially uniform lyophilized cake which maintains an open pore structure). Exemplary bulking agents include, but are not limited to, mannitol, glycine, and xorbitol.

### RAGE Fusion Proteins

[0107] Embodiments of the present invention comprise fusion proteins, nucleic acids encoding for such fusion proteins, methods of making such fusion proteins, and methods of use of such fusion proteins.

[0108] For example, in certain embodiments, the fusion proteins of the present invention comprise a Receptor for Advanced Endproducts (RAGE) polypeptide, wherein the RAGE polypeptide comprises a fragment of a mammalian wild type RAGE peptide, and wherein there is at least one point mutation in the RAGE polypeptide portion of the fusion protein relative to the wild type RAGE peptide. In an embodiment, the fusion protein may comprise a RAGE polypeptide and an immunoglobulin polypeptide, wherein the RAGE polypeptide comprises a fragment of a mammalian wild type RAGE peptide and wherein there is at least one point mutation in the RAGE polypeptide portion of the fusion protein relative to the wild type RAGE peptide and/or the immunoglobulin portion of the RAGE fusion protein.

[0109] For example, in certain embodiments, the present invention comprises a fusion protein comprising a RAGE polypeptide linked to an immunoglobulin polypeptide, wherein the RAGE polypeptide comprises a fragment of a mammalian RAGE having a ligand binding domain, and wherein there is at least one mutation in at least one of the RAGE polypeptide or the immunoglobulin polypeptide relative to the wild-type sequence of the fusion protein, wherein the mutation removes and/or alters at least one of a glycosylation site or an enzyme cleavage site.

[0110] The RAGE polypeptide may be from any mammal. In certain embodiments, the RAGE polypeptide is a human RAGE polypeptide. Also, the immunoglobulin polypeptide may be from any mammal. In certain embodiments, the immuoglobulin polypeptide is a human immunoglobulin polypeptide.

[0111] The point mutation may be selected to provide a beneficial effect in the properties of the RAGE fusion protein. As described in more detail herein, for each of the various embodiments of the RAGE fusion proteins and/or methods of use or making such proteins, the RAGE fusion protein may be modified to improve the properties of the molecule. For example, the RAGE fusion protein of the invention may comprise improved ligand binding as compared to RAGE fusion proteins that do not have at least one mutation relative to the wild-type sequence in at least one of the RAGE polypeptide or the immunoglobulin polypeptide, wherein the mutation removes and/or alters at least one of a glycosylation site or an enzyme cleavage site. Additionally or alternatively, the RAGE fusion protein of the invention may comprise improved stability as compared to RAGE fusion proteins that do not have at least one mutation relative to the wild-type sequence in at least one of the RAGE polypeptide or the immunoglobulin polypeptide, wherein the mutation removes and/or alters at least one of a glycosylation site or an enzyme cleavage site. Additionally or alternatively, the RAGE fusion protein of the invention may comprise an improved pharmacokinetic profile as compared to RAGE fusion proteins that do not have at least one mutation relative to the wild-type sequence in at least one of the RAGE polypeptide or the immunoglobulin polypeptide, wherein the mutation removes and/or alters at least one of a glycosylation site or an enzyme cleavage site.

[0112] For example, in certain embodiments, the point mutation changes the sequence in the wild-type RAGE polypeptide present at a glycosylation site. In this way, the type and/or extent of glycosylation may be modified.

[0113] The glycosylation site may be one of various types of glycosylation sites that are found in proteins. For example, in certain embodiments, the glycosylation recognition site is NXS or NXT. In certain embodiments, X is not proline. Thus, in certain embodiments, the point mutation changes the sequence in the wild-type RAGE polypeptide from NIT to QIT and/or from NGS to QGS, and/or from NGS to NSS, and/or from NST to QST to remove and/or alter at least one glycosylation site. In some embodiments, the glycosylation site is located in the RAGE portion of the RAGE fusion protein. For example, the glycosylation site may, in certain embodiments, be located within the ligand binding site or the ligand binding domain. Additionally and/or alternatively, the glycosylation site is located in the immunoglobulin portion of the RAGE fusion protein. Or, other glycosylation sites that may exist in the RAGE fusion protein may be targeted.

[0114] In certain embodiments, the enzyme cleavage site is a furin cleavage site, such that the point mutation changes the sequence in the wild-type RAGE polypeptide present at a recognition site for furin cleavage of the RAGE polypeptide. For example, in alternate embodiments, the point mutation changes the sequence in the wild-type RAGE polypeptide from one of: (i) PRHRALR to PRHAALR; (ii) PRHRALR to PRHKALR; (iii) PRHRALR to PRHRALA; (iv) PRHRALR to PRHRALK; (v) PRHRALR to PRHRALH; (vi) PRHRALR to PRHRALT; (vii) PRHRALR to PRHHALR; or (viii) PRHRALR to PRHTALR to alter and/or remove a furin cleavage site.

[0115] In certain embodiments, the RAGE polypeptide portion of the fusion protein does not include an N-terminal leader peptide. For example, in certain embodiments, the RAGE polypeptide portion of the fusion protein does not include an N-terminal leader peptide consisting of amino acids 1-23 of the wild-type RAGE. Or, in certain embodiments, the RAGE polypeptide portion of the fusion protein does not include an N-terminal leader peptide consisting of amino acids 1-22 of the wild-type RAGE polypeptide. Or, in other embodiments, the RAGE polypeptide portion of the fusion protein does not include an N-terminal leader peptide consisting of amino acids 1-24 of the wild-type RAGE polypeptide.

[0116] In certain embodiments, the at least one mutation comprises at least one of following: (i) N2Q; (ii) N58Q; (iii) G59S; (iv) N2Q and N58Q; or (v) N2Q and G59S of a human RAGE polypeptide processed such that the RAGE polypeptide portion of the fusion protein does not include an N-terminal leader peptide consisting of amino acids 1-23 of the wild-type RAGE polypeptide. For example, in this numbering system, the RAGE fusion proteins correspond to the amino acid sequence of the RAGE fusion protein of SEQ ID NO: 34 (a RAGE fusion protein having two RAGE immunoglobulin-like domains as described in more detail below), wherein the signal sequence of amino acids 1-23 is not included and the RAGE fusion protein comprises a point mutation or mutations to remove and/or alter a glycosylation site and/or a furin cleavage site based on number that begins with amino acid 24 relative to the full-length wild-type RAGE sequence (SEQ ID NO: 1). Also, in this numbering system, the RAGE fusion proteins correspond to the amino acid sequence of the RAGE fusion protein of SEQ ID NO: 37 (a RAGE fusion protein having one RAGE immunoglobulin-like domains as described in more detail below), wherein the signal sequence of amino acids 1-23 is not included and the RAGE fusion protein comprises a point mutation or mutations to remove and/or alter a glycosylation site and/or a furin cleavage site based on number that begins with amino acid 24 relative to the full-length wild-type RAGE sequence (SEQ ID NO: 1). For example, SEQ ID NO: 62 provides an amino acid sequence for a RAGE fusion protein having two RAGE domains, wherein the first RAGE domain includes an N2Q point mutation which would correspond to N25Q in the full-length RAGE wild-type sequence of SEQ ID NO: 1. Similarly, SEQ ID NO: 63 provides an amino acid sequence for a RAGE fusion protein having two RAGE domains with an N58Q point mutation which would correspond to N81Q in the full-length wild-type sequence. Similar sequences may be generated with RAGE fusion proteins having a single RAGE domain (e.g., SEQ ID NO: 57, 37, 36, and 35) or three domains. For example, as described in more detail herein, SEQ ID NO: 225 is a fusion protein having a single RAGE immunoglobulin-like domain corresponding to amino acids 24 to 136 of RAGE, with mutations in positions 2 (i.e., corresponding to amino acid 25 of the full-length RAGE protein), 58 and 173 of the fusion protein.

[0117] As described in detail herein, the RAGE polypeptide may be a fragment of full-length RAGE. SEQ ID NO: 1 provides an amino acid sequence for full-length RAGE.

[0118] In certain embodiments, the human RAGE polypeptide is processed such that the RAGE polypeptide portion of the fusion protein does not include an N-terminal leader peptide consisting of amino acids 1-23 of the wild-type RAGE polypeptide. In this embodiment, the RAGE polypeptide comprising at least one mutation at a glycosylation site may comprise the sequence as set forth in at least one of: (i) SEQ ID NO: 8, SEQ ID NO: 16, or SEQ ID NO: 20; or (ii) SEQ ID NO: 8, SEQ ID NO: 16, or SEQ ID NO: 20 having the N-terminal glutamine cyclized to form pyroglutamic acid.

[0119] Similarly, in certain embodiments, the mutation to remove the furin cleavage site comprises at least one of R195A, R195K, R195T, R195H, R198A, R198K, R198H, R198T of a human RAGE polypeptide that does not include an N-terminal leader peptide consisting of amino acids 1-23 of the wild-type RAGE polypeptide. In this embodiment, the RAGE polypeptide comprising at least one mutation at a furin cleavage site may comprise the sequence as set forth in SEQ ID NO: 20 or SEQ ID NO: 20 having the N-terminal glutamine cyclized to form pyroglutamic acid. This site is not present in the shorter RAGE fusion proteins of SEQ ID NO: 57, 37, 36, and 35.

[0120] As described in more detail herein, for certain embodiments, the immunoglobulin portion of the RAGE fusion protein is modified to improve the properties of the molecule. For example, in certain embodiments the RAGE fusion protein comprises a mutation at a glycosylation site at position 288 of a human RAGE fusion protein having two RAGE immunoglobulin-like domains (e.g., SEQ ID NO: 34) wherein the RAGE polypeptide portion of the fusion protein does not include an N-terminal leader peptide consisting of amino acids 1-23 of the wild-type RAGE polypeptide. In certain embodiments, the mutation changes a glycosylation site having the amino acid sequence of NST to QST. In an embodiment, the mutation comprises N288Q relative to the RAGE fusion sequence presented as SEQ ID NO: 34. A similar protein may be made in a RAGE fusion protein having only one RAGE domain (TTP3000) (e.g., SEQ ID NO: 37). In this case, the immunoglobulin mutation may be found at position 173. An example of a RAGE fusion protein having a single RAGE domain and with mutations at position 2, 58 and 173 is provided as SEQ ID NO: 225 (FIG. 6FF). It will be understood by those in the art that the mutations described for a fusion protein having two RAGE domains may be made in analogous positions in a RAGE fusion protein having only one RAGE domain or, in proteins having three RAGE domains. The furin cleavage site is not present in the shorter RAGE fusion proteins having only one domain as illustrated in SEQ ID NOs: 57, 37, 36, and 35, but would be present in a wild-type RAGE fusion protein having three RAGE immunoglobulin-like domains.

[0121] Also, as described herein, for each of the embodiments of the RAGE fusion proteins, nucleic acid constructs, and/or other compositions, methods and systems of the invention, the immunoglobulin polypeptide may comprise a C_{H}2 domain or a fragment of a C_{H}2 domain. In an embodiment, the C_{H}2 domain or fragment of a C_{H}2 domain does not include at least a portion of the hinge region. In certain embodiments, the C_{H}2 domain or fragment of a C_{H}2 domain is linked via its C-terminus to the N-terminus of a C_{H}3 domain or a fragment of a C_{H}3 domain of an immunoglobulin polypeptide.

[0122] The immunoglobulin domain may be derived from various immunoglobulins as is known in the art. In certain embodiments, the immunoglobulin comprises a human IgG. Thus, in certain embodiments, the C_{H}2 and C_{H}3 domains of the immunoglobulin comprises SEQ ID NO: 38, or SEQ ID NO: 38 without the C-terminal lysine (i.e., SEQ ID NO: 86), or SEQ ID NO: 38 without the N-terminal proline, or SEQ ID NO: 38 without the N-terminal proline and the terminal lysine (SEQ ID NO: 88). In an embodiment, the C_{H}2 domain comprises SEQ ID NO: 90 or 91. In an embodiment, the portion of the hinge region that is not included in the C_{H}2 domain (or fragment thereof) has the sequence as set forth in SEQ ID NO: 223 or SEQ ID NO: 224. SEQ ID NO: 89 provides an illustrative example of the C_{H}2 and C_{H}3 domains of a human IgG immunoglobulin mutated at a position that corresponds to position 288 of SEQ ID NO: 34.

[0123] Thus, in certain embodiments, the present invention may comprise a RAGE fusion protein comprising a RAGE polypeptide comprising an amino acid sequence as set forth in any one of SEQ ID NOs: 62 to 81, SEQ ID NOs: 92 to 190, or SEQ ID NOs: 58-61, 82, 200 or 201. Also, in certain embodiments, the present invention may comprise a RAGE fusion protein comprising a RAGE polypeptide having an amino acid sequence as set forth in any one of SEQ ID NOs: 62-81, SEQ ID NOs: 92-190, or SEQ ID NOs: 58-61, 82, 200 or 201.

[0124] The RAGE fusion proteins of the present invention may form non-covalent associations with each other. Thus, in certain embodiments, the fusion protein of the invention is in the form of a monomer, a dimer, a trimer, a tetramer, or a mixture thereof.

[0125] For example, in some embodiments, the present invention provides a fusion protein comprising a RAGE polypeptide and an immunoglobulin polypeptide, wherein: (a) the RAGE polypeptide comprises a fragment of a mammalian wild type RAGE polypeptide comprising a RAGE ligand binding domain, and wherein the RAGE polypeptide comprises a point mutation or mutations at one or more of residues relative to the wild type RAGE polypeptide to remove and/or alter a glycosylation site; and (b) the immunoglobulin polypeptide comprises at least a fragment of a C_{H}2 domain and a C_{H}3 domain of an immunoglobulin. In an embodiment, the C_{H}2 domain or fragment thereof is operably linked to the C_{H}3 domain. In other embodiments, the present invention provides a fusion protein comprising a RAGE polypeptide and an immunoglobulin polypeptide, wherein: (a) the RAGE polypeptide comprises a fragment of a mammalian wild type RAGE polypeptide comprising a RAGE ligand binding domain, and wherein the RAGE polypeptide comprises a point mutation or mutations at one or more of residues relative to the wild type RAGE polypeptide to remove and/or alter a furin cleavage site; and (b) the immunoglobulin polypeptide comprises at least a fragment of a C_{H}2 domain and a C_{H}3 domain of an immunoglobulin. In an embodiment, the C_{H}2 domain or fragment thereof is operably linked to the C_{H}3 domain.

[0126] In yet other embodiments, the present invention provides a fusion protein comprising a RAGE polypeptide and an immunoglobulin polypeptide, wherein: (a) the RAGE polypeptide comprises a fragment of a mammalian wild type RAGE polypeptide comprising a RAGE ligand binding domain, and wherein the RAGE fusion protein comprises: (i) a point mutation or mutations at one or more of residues relative to the wild type RAGE polypeptide and/or the immunoglobulin to remove and/or alter a glycosylation site, and/or (ii) a point mutation or mutations at one or more of residues relative to the wild type RAGE peptide to remove and/or alter a furin cleavage site; and (b) the immunoglobulin polypeptide comprises at least a fragment of a C_{H}2 domain and a C_{H}3 domain of an immunoglobulin. In an embodiment, the C_{H}2 domain or fragment thereof is operably linked to the C_{H}3 domain. As noted herein, in certain embodiments, and as described in more detail below, the immunoglobulin polypeptide comprises a fragment of a C_{H}2 domain which does not include at least a portion of the hinge region. Also, in certain embodiments, the hinge region, or portion thereof that is not included as part of the C_{H}2 domain has or comprises the sequence as set forth in SEQ ID NO: 223 or SEQ ID NO: 224.

[0127] Mutation of the wild type RAGE peptide in a fusion protein of the present invention may increase metabolic stability, pharmacokinetic half life relative, and/or the binding affinity relative to wild type RAGE fusion protein (i.e., a RAGE fusion protein without one or more point mutations to remove either a glycosylation site or furin cleavage site). In certain embodiments, the RAGE fusion proteins of the present invention may bind to RAGE ligands (such as S100b) with affinities in the high nanomolar to low micromolar range. Also, in some embodiments, the RAGE fusion proteins of the present invention may have greater affinity for a RAGE ligand than a corresponding wild type RAGE fusion protein. For example, in certain embodiments, the fusion proteins of the present invention having at least one point mutation in the RAGE polypeptide portion to remove a glycosylation site at N2 and/or N58 may have increased the binding affinity for s100b than a similar wild type RAGE fusion protein and may have at least double the binding affinity.

[0128] FIGS. 1-8 provide examples of various amino acid and nucleic acid constructs of the present invention.

[0129] For example, FIG. 1 provides the amino acid sequences for full length human RAGE (SEQ ID NO: 1), full-length human RAGE with signal sequences corresponding to amino acids 1-22 removed (SEQ ID NO: 2) and 1-23 removed (SEQ ID NO: 3) (FIG. 1A). Also provided in FIG. 1 are various fragments of human RAGE that may be used in the RAGE fusion proteins of the present invention (SEQ ID NOs: 4-24 and 44) (FIG. 1C-1F, and FIG. 1J), as well as DNA sequences that encode for these RAGE polypeptide sequences and fragments of RAGE polypeptide sequences (SEQ ID NOs: 25-29) (FIG. 1G-1H). Also shown in FIG. 1 (FIG. 1I and FIG. 1J) are amino acid sequences for a human immunoglobulin polypeptide comprising a C_{H}2 and a C_{H}3 domain, wherein the C_{H}2 does not include at least part of the hinge region (SEQ ID NO: 38), an amino acid sequence for a human immunoglobulin polypeptide comprising a C_{H}2 and a C_{H}3 domain, wherein the C_{H}2 does include at least part of the hinge region (SEQ ID NO: 40), an amino acid sequence for a human immunoglobulin polypeptide comprising a C_{H}2 domain including at least part of the hinge (SEQ ID NO: 42), an amino acid sequence for a human immunoglobulin polypeptide comprising a C_{H}3 domain, as well as DNA sequences encoding a human immunoglobulin polypeptide comprising a C_{H}2 and a C_{H}3 domain, where the C_{H}2 does not include at least part of the hinge region (SEQ ID NO: 41) and where the C_{H}2 does include at least part of the hinge region (SEQ ID NO: 39). Also provided in FIG. 1 are sequences for fragments of RAGE wherein the N-terminal glutamine (Q) is cyclized to pyroglutamic acid (FIGS. 1K and 1L). FIG. 1M provides SEQ ID NOs: 52 and 53 which are alternate nucleic acid sequences that encode the immunoglobulin polypeptides of SEQ ID NOs: 38 and 40, respectively.

[0130] As described in more detail below, FIGS. 2 and 3 provide the sequences of various nucleic acid constructs that encode for RAGE fusion proteins of the present invention. FIGS. 4 and 5 provide amino acid sequences for various RAGE fusion proteins of the present invention.

[0131] The location of mutant residues is delineated herein with respect to mammalian RAGE having the N-terminal sequence, corresponding to amino acids 1-23 of the full length protein, removed. For example, N2 corresponds to a glutamine residue (N) at position 2 of the RAGE polypeptide without the signal sequence (SEQ ID NO: 3); this would correspond to glutamine at position 25 of the full-length RAGE (SEQ ID NO: 1) (see FIG. 1). Thus, the fusion protein of any of the previous embodiments may comprise a RAGE polypeptide comprising a fragment of the human RAGE peptide of SEQ ID NO: 3. Thus, as noted above, in the description of specific point mutations used herein, the location of the RAGE and/or immunoglobulin polypeptide mutations is based on residue numbers of the amino acid sequence of SEQ ID NO: 3 or a RAGE fusion protein having two RAGE domains and as shown in SEQ ID NO: 34. The amino acid sequence of SEQ ID NO: 3 corresponds to the full-length sequence of human RAGE without the signal sequence (i.e., SEQ ID NO: 1 without residues 1-23). The amino acid sequence of SEQ ID NO: 34 corresponds to the sequence of a human RAGE fusion protein having two RAGE domains without the signal sequence (i.e., SEQ ID NO: 1 without residues 1-23). It will be understood by those in the art that the mutations described for a fusion protein having two RAGE domains (e.g., SEQ ID NO: 34) may be made in analogous positions in a RAGE fusion protein having only one RAGE domain or in RAGE fusion proteins having three RAGE domains. This furin cleavage site is not present in the shorter RAGE fusion proteins having only one domain as illustrated in SEQ ID NOs: 57, 37, 36, and 35.

[0132] In certain embodiments of the fusion protein where the RAGE polypeptide comprises a point mutation to remove a glycosylation site, the point mutation may be in the RAGE ligand binding domain. In such an embodiment, the point mutation to remove a glycosylation site may be, alternatively, within the first 100, 90, 80, 70, 60, 50, 40, or 30 amino acids of the N-terminus of the fusion protein that does not include the signal sequence.

[0133] In another embodiment, the present invention provides a fusion protein of any of the previous embodiments wherein: (a) the RAGE polypeptide comprises a fragment of human wild type RAGE peptide (SEQ ID NO:3) comprising a RAGE ligand binding domain and at least the first 200 amino acids of SEQ ID NO:3, and wherein the RAGE polypeptide comprises: (i) a point mutation or mutations at one or both of residues 2 or 58 to remove and/or alter a glycosylation site; and/or (ii) a point mutation at one or more of residues 193 to 198 to remove and/or alter a furin cleavage site; and (b) the immunoglobulin polypeptide comprises at least a fragment of a C_{H}2 domain and a C_{H}3 domain of an immunoglobulin. In some embodiments, the present invention provides a fusion protein of any of the previous embodiments wherein the RAGE ligand binding domain comprises the most N-terminal domain of the fusion protein.

[0134] In some embodiments, the RAGE polypeptide comprises a point mutation selected from the group consisting of: (a) N2Q; (b) N58Q; (c) N2Q and N58Q, wherein the position of the mutation is relative to SEQ ID NO: 3, and wherein RAGE polypeptide comprises SEQ ID NO: 13, 14, 15, 16, 46, 48, or 49. In other embodiments, the RAGE polypeptide comprises a point mutation selected from the group consisting of: (a) N2Q; (b) N58Q; (c) N2Q and N58Q, wherein the position of the mutation is relative to SEQ ID NO: 3, and wherein RAGE polypeptide is SEQ ID NO: 13, 14, 15, 16, 46, 48, or 49.

[0135] In yet other embodiments, the point mutation corresponds to a point mutation selected from the group consisting of: (a) R195A; (b) R195K; (c) R198A; (d) R198K; (e) R198H; and (f) R198T, wherein the position of the mutation is relative to SEQ ID NO: 3, and wherein RAGE polypeptide comprises SEQ ID NO: 5, 6, 17, 18, 19, 20, 45, 50, or 51. Or, the point mutation corresponds to a point mutation selected from the group consisting of: (a) R195A; (b) R195K; (c) R198A; (d) R198K; (e) R198H; and (f) R198T, wherein the position of the mutation is relative to SEQ ID NO: 3, and wherein RAGE polypeptide is SEQ ID NO: 5, 6, 17, 18, 19, 20, 45, 50, or 51.

[0136] In yet other embodiments, the point mutation corresponds to a point mutation selected from the group consisting of: (a) N2Q; (b) N58Q; (c) N2Q and N58Q; (d) R195A; (e) R195K; (f) R198A; (g) R198K; (h) R198H; (i) R198T; (j) N2Q and R198A; (k) N58Q and R198A; and (l) N2Q, N58Q, and R198A wherein the position of the mutation is relative to SEQ ID NO: 3, and wherein RAGE polypeptide comprises SEQ ID NO: 5, 6, 17, 18, 19, 20, 45, 50, or 51. In yet other embodiments, the point mutation corresponds to a point mutation selected from the group consisting of: (a) N2Q; (b) N58Q; (c) N2Q and N58Q; (d) R195A; (e) R195K; (f) R198A; (g) R198K; (h) R198H; (i) R198T; (j) N2Q and R198A; (k) N58Q and R198A; and (l) N2Q, N58Q, and R198A wherein the position of the mutation is relative to SEQ ID NO: 3, and wherein RAGE polypeptide is SEQ ID NO: 5, 6, 17, 18, 19, 20, 45, 50, or 51.

[0137] In yet other embodiments, the point mutation corresponds to a point mutation selected from the group consisting of R195H, R195T, and/or G59S either alone or in any possible combination, and/or the mutations described above in combination with at least one of R195H, R195T, and/or G59S, wherein the position of the mutation is relative to SEQ ID NO: 3, and wherein RAGE polypeptide comprises SEQ ID NO: 5, 6, 17, 18, 19, 20, 45, 50, or 51. In yet other embodiments, the point mutation corresponds to a point mutation selected from the group consisting of R195H, R195T, and/or G59S either alone or in any possible combination, and/or mutations described above in wherein the position of the mutation is relative to SEQ ID NO: 3, and wherein RAGE polypeptide is SEQ ID NO: 5, 6, 17, 18, 19, 20, 45, 50, or 51.

[0138] Table 1 below provides a non-limiting compilation of example mutations of the present invention where the position of the mutation is provided relative to the RAGE fusion protein having the amino acid sequence as set forth in SEQ ID NO: 34. The actual amino acid sequences of Table 1 (i.e., SEQ ID NOs: 62 to 81, SEQ ID NOs: 92 to 190 and SEQ ID NOs: 58-61, 82, 200 and 201) are shown in FIG. 6A-6EE.

TABLE 1

| | Processing Variant of TTP4000 (SEQ ID NO:) | | | | | |
|---|---|---|---|---|---|---|
| | | | | | | (−) 1-23 |
| | | (−) 1-23 | | | (−) 1-24 | Signal |
| | | Signal | | | Signal | (−) C- |
| | | (−) C- | (−) 1-23 | | (−) C- | terminal |
| | (−) 1-23 | terminal | Signal | (−) 1-24 | terminal | K |
| Mutation | Signal | K | (+) pE | Signal | K | (+) pE |
| N2Q | 62 | 92 | 112 | 132 | 152 | 172 |
| N58Q | 63 | 93 | 113 | 133 | 153 | 173 |
| N2Q, N58Q | 64 | 94 | 114 | 134 | 154 | 174 |
| R195A | 65 | 95 | 115 | 135 | 155 | 175 |
| R195K | 66 | 96 | 116 | 136 | 156 | 176 |
| R198A | 67 | 97 | 117 | 137 | 157 | 177 |
| R198K | 68 | 98 | 118 | 138 | 158 | 178 |
| R198H | 69 | 99 | 119 | 139 | 159 | 179 |
| R198T | 70 | 100 | 120 | 140 | 160 | 180 |
| N2Q, R198A | 71 | 101 | 121 | 141 | 161 | 181 |
| N58Q, R198A | 72 | 102 | 122 | 142 | 162 | 182 |
| N2Q, N58Q, | 73 | 103 | 123 | 143 | 163 | 183 |
| R198A | | | | | | |
| N288Q | 74 | 104 | 124 | 144 | 164 | 184 |
| N2Q, N288Q | 75 | 105 | 125 | 145 | 165 | 185 |
| N58Q, N288Q | 76 | 106 | 126 | 146 | 166 | 186 |
| N2Q, N58Q, | 77 | 107 | 127 | 147 | 167 | 187 |
| N288Q | | | | | | |
| N2Q, R198A, | 78 | 108 | 128 | 148 | 168 | 188 |
| N288Q | | | | | | |
| N58Q, R198A, | 79 | 109 | 129 | 149 | 169 | 189 |
| N288Q | | | | | | |
| N2Q, N58Q, | 80 | 110 | 130 | 150 | 170 | 190 |
| R198A, | | | | | | |
| N288Q | | | | | | |
| G59S, R198A | 81 | 111 | 131 | 151 | 171 | 200 |
| N2Q, G59S, | 58 | 59 | 60 | 61 | 82 | 201 |
| R198A | | | | | | |

[0139] In other embodiments, the fusion protein of the present invention comprises an amino acid sequence at least 70%, 75%, 80%, 85%, 90%, 95%, 96%, 97%, 98%, or 99% identical to one of the sequences described above. In other embodiments, the fusion protein of the present invention comprises an amino acid sequence at least 70%, 75%, 80%, 85%, 90%, 95%, 96%, 97%, 98%, or 99% identical to SEQ ID NOs: 62 to 81, SEQ ID NOs: 92 to 190, or SEQ ID NOs: 58-61, 82, 200 or 201 wherein the RAGE polypeptide portion of the RAGE fusion protein comprises: (i) a point mutation or mutations at one or more of residues to remove and/or alter a glycosylation site; and/or (ii) a point mutation at one or more of residues to remove and/or alter a furin cleavage site.

[0140] In another embodiment, the fusion protein of the present invention comprises an amino acid sequence as set forth in any one of SEQ ID NOs: 62 to 81, SEQ ID NOs: 92 to 190 or SEQ ID NOs: 58-61, 82, 200 or 201. In another embodiment, the fusion protein of the present invention is the amino acid sequence of any one of SEQ ID NOs: 62 to 81, SEQ ID NOs: 92 to 190, or SEQ ID NOs: 58-61, 82, 200 or 201.

[0141] A RAGE polypeptide of the fusion proteins of the invention may comprise a fragment of a mammalian wild type RAGE peptide comprising a RAGE ligand binding domain. In an embodiment, a fragment of a RAGE peptide may comprise at least an uninterrupted 25, 26, 27, 28, 29, 30, 31, 32, 33, 34, 35, 36, 37, 38, 39, 40, 41, 42, 43, 44, 45, 46, 47, 48, 49, 50, 55, 60, 65, 70, 75, 80, 85, 90, 95, 100, 105, 110, 115, 120, 125, 130, 135, 140, 145, 150, 155, 160, 165, 170, 175, 180, 185, 190, 195, 200, 205, 210, 215, 220, 225, 230, 235, 240, 245, or 250 amino acid sequence from the wild-type RAGE peptide. In an embodiment, the RAGE polypeptide comprises a fragment of the human wild type RAGE peptide of SEQ ID NO: 6 (FIG. 1C).

[0142] The RAGE ligand binding domain of the RAGE polypeptide of any of the previous embodiments may comprise a RAGE V domain, see e.g., SEQ ID NO: 7, SEQ ID NO: 8, SEQ ID NO: 46 (FIGS. 1D and 1K) and SEQ ID NO: 191, SEQ ID NO: 192, or SEQ ID NO: 193 in FIG. 8C). Or, a sequence at least 95% identical to the RAGE V domain or a fragment thereof may be used.

[0143] In another embodiment, the RAGE ligand binding domain of any of the previous embodiments may comprise SEQ ID NO: 9, or a sequence at least 95% identical thereto, or SEQ ID NO: 10, or a sequence at least 95% identical thereto (FIG. 1D), or SEQ ID NO: 47, or a sequence at least 95% identical thereto (FIG. 1K), or SEQ ID NO: 194, or a sequence at least 95% identical thereto, or SEQ ID NO: 195, or a sequence at least 95% identical thereto (FIG. 8C).

[0144] In another embodiment, the ligand binding domain may comprise amino acids 23-53 of SEQ ID NO. 1 (FIG. 1). In another embodiment, the ligand binding domain may comprise amino acids 24-52 of SEQ ID NO: 1. In another embodiment, the ligand binding domain may comprise amino acids 31-52 of SEQ ID NO: 1. In another embodiment, the ligand binding domain may comprise amino acids 31-116 of SEQ ID NO: 1. In another embodiment, the ligand binding domain may comprise amino acids 19-52 of SEQ ID NO: 1. For example, the ligand binding domain may comprise, a RAGE V domain or a portion thereof such as the RAGE ligand binding domain (e.g., amino acids 1-118, 23-118, 24-118, 31-118, 1-116, 23-116, 24-116, 31-116, 1-54, 23-54, 24-54, 31-54, 1-53, 23-53, 24-53, or 31-53 of SEQ ID NO: 1, or fragments thereof). Or fragments of the polypeptides that functionally bind a RAGE ligand may be used. Or, a sequence at least 70%, 75%, 80%, 85%, 90%, 95%, 97%, 98% or 99% identical to the RAGE V domain or a fragment thereof (e.g., as described above) may be used.

[0145] Further, as is known in the art, in embodiments where the N-terminus of the fusion protein is glutamine, as for example upon removal of the signal sequence comprising residues 1-23 of SEQ ID NO: 1, the glutamine (e.g., Q24 for a polypeptide comprise amino acids 24-118 or SEQ ID NO: 1) may cyclize to form pyroglutamic acid (pE). As described herein, in each of these embodiments having an N-terminal glutamine cyclize to pE, the sequences comprising a RAGE ligand binding domain may contain at least one point mutation to alter a glycosylation site, or contain one point mutation to remove a glycosylation site, or may contain two or more point mutations to remove and/or alter two glycosylation sites. Also, the RAGE sequence may comprise a mutation to alter and/or remove an enzyme (e.g., furin) cleavage site.

[0146] As described in more detail herein, the RAGE fusion proteins of the present invention may be expressed in cells. FIG. 7 provides nucleic acid sequences that may be used to encode a RAGE fusion protein of the present invention, wherein SEQ ID NO: 221 comprises a wild-type nucleic acid sequence (i.e., wild type for human RAGE and human immunoglobulin) and a nucleic acid sequence (SEQ ID NO: 222) optimized for expression. Also, FIG. 8A provides wild-type and modified nucleic acid sequences (SEQ ID NOs: 84 and 85) corresponding to the signal sequence of human RAGE.

[0147] Thus, in certain embodiments, the RAGE polypeptide may further comprise signal sequence residues. For example, the signal sequence of a fusion protein may comprise the native human RAGE signal sequence (SEQ ID NO: 83) or signal sequence that has been modified from the native sequence (e.g., SEQ ID NO: 84), or a signal sequence where the leader sequence has a glycine as a first residue rather than methionine (see e.g., Neeper et al., 1992).

[0148] As recognized in the art, the C_{H}3 region of the RAGE fusion proteins of the present invention may have the C-terminal amino acid cleaved off through a post-translational modification when expressed in certain recombinant systems. (See e.g., Li, et al., BioProcessing J., 4:23-30 (2005)). In an embodiment, the C-terminal amino acid cleaved off is lysine (K). Thus, in alternate embodiments of each of the proteins and protein compositions of the invention, the RAGE fusion protein of the present invention may comprise a polypeptide having the amino acid sequence without the C-terminal lysine (K). Non-limiting examples of such fusion proteins include SEQ ID NOs: 92-111, 152-171, 59 and 82.

[0149] As discussed herein, the fusion protein may also comprise a polypeptide derived from an immunoglobulin. In various embodiments, and as illustrated in the example embodiments disclosed herein, the RAGE fusion protein comprises a point mutation at residue to remove a glycosylation site within the immunoglobulin polypeptide of the RAGE fusion protein. For example, in one embodiment, the RAGE fusion protein may comprise a mutation at position 288 (e.g., N288Q) relative to the sequence as set forth in SEQ ID NO: 34 and/or position 173 (e.g., N173Q) relative to the sequence as set forth in SEQ ID NO: 37.

[0150] In certain embodiments, the immunoglobulin polypeptide comprises a C_{H}2 domain or a fragment of a C_{H}2 domain that does not include at least a portion of the hinge region. For example, in alternate embodiments, the hinge region that is not included as part of the C_{H}2 domain has the sequence as set forth in SEQ ID NOs: 223 or 224. In certain embodiments, the C_{H}2 domain, or fragment thereof, is linked via its C-terminus to the N-terminus of a C_{H}3 domain, or fragment thereof, of an immunoglobulin polypeptide.

[0151] Thus, in certain embodiments, the immunoglobulin polypeptide comprises at least a fragment of a C_{H}2 domain and at least a fragment of a C_{H}3 domain of an immunoglobulin. In one embodiment, the immunoglobulin polypeptide may comprise an immunoglobulin heavy chain or a portion (i.e., fragment) thereof. For example, the heavy chain fragment may comprise a polypeptide derived from the Fc fragment of an immunoglobulin, wherein the Fc fragment comprises the heavy chain hinge polypeptide, and C_{H}2 and C_{H}3 domains of the immunoglobulin heavy chain as a monomer. The heavy chain (or portion thereof) may be derived from any one of the known heavy chain isotypes: IgG (γ), IgM (μ), IgD (δ), IgE (ε), or IgA (α). In addition, the heavy chain (or portion thereof) may be derived from any one of the known heavy chain subtypes: IgG1 (γ1), IgG2 (γ2), IgG3 (γ3), IgG4 (γ4), IgA1 (α1), IgA2 (α2), or mutations of these isotypes or subtypes that alter the biological activity. The immunoglobulin may comprise the C_{H}2 and C_{H}3 domains of a human IgG1 or portions of either, or both, of these domains. As an example embodiment, the polypeptide comprising the C_{H}2 and C_{H}3 domains of a human IgG1 or a portion thereof may comprise SEQ ID NO: 40 (FIG. 1) or a portion thereof. In one embodiment, the polypeptide comprising the C_{H}2 and C_{H}3 domains of a human IgG1, or a portion thereof, may comprise SEQ ID NO: 38 or a fragment thereof. The immunoglobulin peptide may be encoded by the nucleic acid sequence of SEQ ID NO: 39 or SEQ ID NO: 41 (FIG. 1). The immunoglobulin sequence in SEQ ID NO: 38 or SEQ ID NO: 40 may also be encoded by SEQ ID NO: 52 or SEQ ID NO: 53 (FIG. 1), where silent base changes for the codons that encode for proline (CCG to CCC) and glycine (GGT to GGG) at the C-terminus of the sequence remove a cryptic RNA splice site near the terminal codon (i.e., nucleotides 622-627 of SEQ ID NO: 39 are modified to generate SEQ ID NO: 52 or nucleotides 652-657 of SEQ ID NO: 41 are modified to generate SEQ ID NO: 53). In another embodiment, the C_{H}2 domain, or a fragment thereof comprises SEQ ID NO: 42 (FIG. 1). In another embodiment, the fragment of SEQ ID NO: 42 comprises SEQ ID NO: 42 with the first ten or eleven amino acids comprising at least a portion of the Fc hinge region removed (see e.g., SEQ ID NO: 90 or 91).

[0152] The hinge region of the Fc portion of the immunoglobulin chain may be proinflammatory in vivo. Thus, in one embodiment, the RAGE fusion protein of the present invention comprises an interdomain linker derived from RAGE rather than an interdomain hinge polypeptide derived from an immunoglobulin.

[0153] Thus in certain embodiments, the RAGE fusion protein may comprise a RAGE polypeptide directly linked to an immunoglobulin polypeptide, wherein the immunoglobulin polypeptide comprises at least a fragment of a C_{H}2 domain and at least a fragment of a C_{H}3 domain of an immunoglobulin. In one embodiment, the C_{H}2 domain, or a fragment thereof, comprises SEQ ID NO: 42 (FIG. 1). In an embodiment, the fragment of SEQ ID NO: 42 comprises SEQ ID NO: 42 with the first ten or eleven amino acids comprising at least a portion of the Fc hinge region removed (See SEQ ID NO: 90 or 91) (FIG. 8B). For example, as noted above, in certain embodiments, this 11 or 10 amino acid hinge region that has been removed from the C_{H}2 domain has the sequence as set forth in SEQ ID NOs: 223 or 224, respectively (FIG. 8C).

[0154] As noted above, in certain embodiments, the C_{H}2 domain is linked via its C-terminus to the N-terminus of a C_{H}3 domain of an immunoglobulin polypeptide. For example, in certain embodiments, the immunoglobulin polypeptide of any one of the previous embodiments of the fusion protein may comprise any one of SEQ ID NOS: 86, 87, 88, or 89. As shown in FIG. 8B, SEQ ID NO: 89 comprises a mutation corresponding to N288Q as set forth in the RAGE fusion protein of SEQ ID NO: 34 so as to remove a glycosylation site in the immunoglobulin portion of the RAGE fusion protein.

[0155] The RAGE polypeptide used in the RAGE fusion proteins of the present invention may comprise a RAGE immunoglobulin domain or multiple RAGE immunoglobulin domains. Additionally or alternatively, the fragment of RAGE may comprise an interdomain linker. For example, the RAGE polypeptide may comprise a RAGE immunoglobulin domain linked to an upstream (i.e., closer to the N-terminus) or downstream (i.e., closer to the C-terminus) interdomain linker.

[0156] In some embodiments, the RAGE polypeptide may comprise two (or more) RAGE immunoglobulin domains each linked to each other by an interdomain linker. In such embodiments, the RAGE polypeptide may comprise multiple RAGE immunoglobulin domains linked to each other by one or more interdomain linkers. The RAGE polypeptide may further comprise a terminal interdomain linker attached to the N-terminal RAGE immunoglobulin domain and/or the C-terminal immunoglobulin domain. Additional combinations of RAGE immunoglobulin domains and interdomain linkers are within the scope of the present invention.

[0157] In one embodiment, the RAGE polypeptide comprises a RAGE interdomain linker linked to a RAGE immunoglobulin domain such that the C-terminal amino acid of the RAGE immunoglobulin domain is linked to the N-terminal amino acid of the RAGE interdomain linker, and the C-terminal amino acid of the RAGE interdomain linker is directly linked to the N-terminal amino acid of an immunoglobulin polypeptide. The polypeptide comprising a C_{H}2 domain of an immunoglobulin may, as described above, comprise at least a fragment of a C_{H}2 domain and a C_{H}3 domain of an immunoglobulin, for example at least a fragment of the C_{H}2 and C_{H}3 domains of a human IgG1. For example, the immunoglobulin polypeptide may comprise a fragment of a C_{H}2 domain from which the hinge region has been at least partly removed.

[0158] In one embodiment, the RAGE fusion protein may comprise two immunoglobulin domains derived from RAGE protein and two immunoglobulin domains derived from a human Fc polypeptide. The RAGE fusion protein may comprise a first RAGE immunoglobulin domain and a first RAGE interdomain linker linked to a second RAGE immunoglobulin domain and a second RAGE interdomain linker, such that the N-terminal amino acid of the first interdomain linker is linked to the C-terminal amino acid of the first RAGE immunoglobulin domain, the N-terminal amino acid of the second RAGE immunoglobulin domain is linked to C-terminal amino acid of the first interdomain linker, the N-terminal amino acid of the second interdomain linker is linked to C-terminal amino acid of the second RAGE immunoglobulin domain, and the C-terminal amino acid of the RAGE second interdomain linker is linked to the N-terminal amino acid of the C_{H}2 immunoglobulin domain. In a further embodiment, the C-terminal amino acid of the RAGE second interdomain linker is directly linked to the N-terminal amino acid of the C_{H}2 immunoglobulin domain. Examples of such constructs are provided as SEQ ID NOs: 32, 33, 34 and 56 (FIG. 4).

[0159] Alternatively, a three domain RAGE fusion protein may comprise one immunoglobulin domain derived from RAGE and two immunoglobulin domains derived from a human Fc polypeptide. For example, the RAGE fusion protein may comprise a single RAGE immunoglobulin domain linked via a RAGE interdomain linker to the N-terminal amino acid of a C_{H}2 immunoglobulin domain or a portion of a C_{H}2 immunoglobulin domain. In a further embodiment, the C-terminal amino acid of the RAGE interdomain linker is directly linked the N-terminal amino acid of the C_{H}2 immunoglobulin domain or a portion of a C_{H}2 immunoglobulin domain. Examples of such constructs are provided as SEQ ID NOs: 35, 36, 37 and 57 (FIG. 5).

[0160] A RAGE interdomain linker fragment may comprise a peptide sequence that is naturally downstream of, and thus, linked to, a RAGE immunoglobulin domain. For example, for the RAGE V domain, the interdomain linker may comprise amino acid sequences that are naturally downstream from the V domain (FIG. 1F). In an embodiment, the linker may comprise SEQ ID NO: 21, corresponding to amino acids 117-123 of full-length RAGE (SEQ ID NO: 1). Or, the linker may comprise a peptide having additional portions of the natural RAGE sequence. For example, an interdomain linker comprising several amino acids (e.g., 1-3, 1-5, or 1-10, or 1-15 amino acids) upstream and downstream of SEQ ID NO: 21 may be used. Thus, in one embodiment, the interdomain linker comprises SEQ ID NO: 23 comprising amino acids 117-136 of full-length RAGE (SEQ ID NO: 1). Or, fragments of SEQ ID NO: 21 deleting, for example, 1, 2, or 3, amino acids from either end of the linker may be used. In alternate embodiments, the linker may comprise a peptide that is at least 70%, 75%, 80%, 85%, 90%, 95%, 96%, 97%, 98%, or 99% identical to SEQ ID NO: 21 or SEQ ID NO: 23.

[0161] For the RAGE C1 domain, the linker may comprise peptide sequence that is naturally downstream of the C1 domain. In an embodiment, the linker may comprise SEQ ID NO: 22, corresponding to amino acids 222-251 of full-length RAGE (SEQ ID NO: 1). Or, the linker may comprise a peptide having additional portions of the natural RAGE sequence. For example, a linker comprising several (1-3, 1-5, or 1-10, or 1-15 amino acids) amino acids upstream and downstream of SEQ ID NO: 22 may be used. Or, fragments of SEQ ID NO: 22 may be used, deleting for example, 1-3, 1-5, or 1-10, or 1-15 amino acids from either end of the linker. For example, in one embodiment, a RAGE interdomain linker may comprise SEQ ID NO: 24, corresponding to amino acids 222-226 of full-length RAGE (SEQ ID NO: 1). In alternate embodiments, the linker may comprise a peptide that is at least 70%, 75%, 80%, 85%, 90%, 95%, 96%, 97%, 98%, or 99% identical to SEQ ID NO: 22 or SEQ ID NO: 24.

[0162] Examples of amino acid substitutions that may be used in generating various point mutations to remove either a glycosylation site and/or an enzyme cleavage site are provided herein. Thus, as described herein, glutamine (Q) may be substituted for asparagine (N). Also, lysine (K) or histidine (H) may be substituted for arginine (R). Or, in alternate embodiments, neutral amino acids, as for example, alanine (A) or threonine (T) may be substituted for arginine (R). Or, neutral amino acids may be substituted for each other, as for example serine (S) may be substituted for glycine (G).

[0163] Additionally, one of skill will recognize that individual substitutions, deletions or additions which alter, add or delete a single amino acid or a small percentage of amino acids (typically less than about 5%, more typically less than about 1%) in an encoded sequence are conservatively modified variations where the alterations result in the substitution of an amino acid with a chemically similar amino acid. Conservative substitution tables providing functionally similar amino acids are well known in the art. The following example groups each contain amino acids that are conservative substitutions for one another:

[0164] 1) Alanine (A), Serine (S), Threonine (T);

[0165] 2) Aspartic acid (D), Glutamic acid (E);

[0166] 3) Asparagine (N), Glutamine (Q);

[0167] 4) Arginine (R), Lysine (K);

[0168] 5) Isoleucine (I), Leucine (L), Methionine (M), Valine (V); and

[0169] 6) Phenylalanine (F), Tyrosine (Y), Tryptophan (W).

[0170] Generally, a conservative substitution is a substitution in which the substituting amino acid (naturally occurring or modified) is structurally related to the amino acid being substituted, i.e., has about the same size and electronic properties as the amino acid being substituted. Thus, the substituting amino acid would have the same or a similar functional group in the side chain as the original amino acid. A “conservative substitution” may also refer to utilizing a substituting amino acid which is identical to the amino acid being substituted except that a functional group in the side chain is protected with a suitable protecting group.

[0171] Also, as is known in the art, amino acids may become chemically modified from their natural structure, either by enzymatic or non-enzymatic reaction mechanisms. For example, in one embodiment, an N-terminal glutamic acid or glutamine may cyclize, with loss of water, to form pyroglutamic acid (pyroE or pE) (Chelius et al., Anal. Chem, 78: 2370-2376 (2006) and Burstein et al., Proc. National Acad. Sci., 73:2604-2608 (1976)). Alternatively, a fusion protein having an N-terminal pyroglutamic acid could potentially be accessed through a nucleic acid sequence encoding for glutamic acid at the position in the protein that via post-translational processing becomes the N-terminus (e.g., where residue 24 of SEQ ID NO: 1 is glutamate rather than a glutamine). The fusion proteins of the present invention comprise other chemical modifications that may occur either by enzymatic or non-enzymatic reaction mechanisms either during expression and/or purification, or that may be added to assist in other aspects of protein function.

[0172] The fusion proteins of the present invention may associate either in vivo or in vitro via non-covalent interactions to form multimers. Thus, in any of the previous embodiments of the fusion protein, the fusion protein may be in the form of a monomer, a dimer, a trimer, a tetramer, or a mixture thereof.

[0173] There are various advantages that may be associated with particular embodiments of the present invention. In certain embodiments, and as discussed in more detail below, the RAGE fusion proteins of the present invention may be metabolically stable when administered to a subject relative to the corresponding fusion protein containing an unmutated wild type RAGE peptide.

[0174] Also, as discussed in more detail below, the RAGE fusion proteins of the present invention may exhibit a higher affinity binding for RAGE ligands relative to the corresponding fusion protein contain an unmutated wild type RAGE peptide. In certain embodiments, the RAGE fusion proteins of the present invention bind to RAGE ligands with affinities in the high nanomolar to low micromolar range. By binding with high affinity to physiological RAGE ligands, the RAGE fusion proteins of the present invention may be used to inhibit binding of endogenous ligands to RAGE, thereby providing a means to ameliorate RAGE-mediated diseases.

### Methods of Producing RAGE Fusion Proteins

[0175] The present invention also comprises a method to make a RAGE fusion protein of any one of the fusion protein embodiments described above. Thus, in one embodiment, the present invention comprises expressing a nucleic acid sequence that encodes for any one of the fusion protein embodiments described herein.

[0176] The nucleic acid constructs of the present invention may encode RAGE fusion proteins having each of the embodiments as described herein. For example, in certain embodiments, the present invention comprises an isolated nucleic acid encoding a fusion protein comprising a RAGE polypeptide linked to an immunoglobulin polypeptide, wherein the RAGE polypeptide comprises a fragment of a mammalian RAGE having a ligand binding domain, and wherein the fusion protein comprises at least one mutation relative to the wild-type sequence in at least one of the RAGE polypeptide or the immunoglobulin polypeptide relative to the wild type sequence, wherein the mutation removes and/or alters at least one of a glycosylation site or an enzyme cleavage site. In certain embodiments, the immunoglobulin polypeptide comprises at least a fragment of a C_{H}2 domain. In certain embodiments, the C_{H}2 domain or fragment thereof does not include a hinge region. Also, in certain embodiments, the enzyme cleavage site is a furin cleavage site.

[0177] The RAGE fusion protein may be engineered by recombinant DNA techniques. For example, in one embodiment, the present invention may comprise a nucleic acid sequence comprising, complementary to, or having significant identity with, a polynucleotide sequence that encodes for any one of the fusion protein embodiments described above. For example, the linked RAGE polypeptide and the immunoglobulin polypeptide may be encoded by a recombinant DNA construct. The method may further comprise the step of incorporating the DNA construct into an expression vector. Also, the method may comprise the step of inserting the expression vector into a host cell.

[0178] Each of the embodiments described above for the various RAGE fusion proteins of the invention are included in the nucleic acid constructs, expression vectors, and host cells used to produce such RAGE fusion proteins.

[0179] Thus, embodiments of the present invention may comprise nucleic acid molecules that encode the RAGE fusion proteins of the present invention. In certain embodiments, present invention provides a nucleic acid molecule that encodes for one of the amino acid sequences of SEQ ID NOs: 62 to 81, 92 to 190, 58 to 61, 82 or, 200, 201.

[0180] In other embodiments, the nucleic acid molecules encode for a RAGE fusion protein that comprises an amino acid sequence at least 70%, 75%, 80%, 85%, 90%, 95%, 96%, 97%, 98%, or 99% identical to one of the RAGE fusion proteins of Table 1, i.e., SEQ ID NOS: 62 to 81, 92 to 190, 58 to 61, 82 or 201, wherein the RAGE polypeptide portion of the RAGE fusion protein comprises: (i) a point mutation or mutations at one or more of residues to remove and/or alter a glycosylation site; and/or (ii) a point mutation at one or more of residues to remove and/or alter a furin cleavage site.

[0181] In another embodiment, the nucleic acid encodes a fusion protein comprising an immunoglobulin polypeptide wherein the immunoglobulin polypeptide comprises a point mutation to remove and/or alter a glycosylation site in the immunoglobulin polypeptide relative to the native immunoglobulin amino acid sequence.

[0182] The point mutation may be selected to provide a beneficial effect in the properties of the RAGE fusion protein. For example, in certain embodiments, the point mutation changes the sequence in the wild-type RAGE polypeptide present at a glycosylation site. In this way, the type and/or extent of glycosylation may be modified.

[0183] The glycosylation site may be one of various types of glycosylation sites that are found in proteins. For example, in certain embodiments, the glycosylation recognition site is NXS or NXT. In certain embodiments, X is not proline. Thus, in certain embodiments, the point mutation changes the sequence in the wild-type RAGE polypeptide from NIT to QIT and/or from NGS to QGS, and/or from NGS to NSS and/or from NST to QST to remove and/or alter at least one glycosylation site. In some embodiments, the glycosylation site is located in the RAGE portion of the RAGE fusion protein. For example, the glycosylation site may, in certain embodiments, be located within the ligand binding site or the ligand binding domain. Additionally and/or alternatively, the glycosylation site is located in the immunoglobulin portion of the RAGE fusion protein. Or, other glycosylation sites that may exist in the RAGE fusion protein may be targeted.

[0184] In certain embodiments, the enzyme cleavage site is a furin cleavage site, such that the point mutation changes the sequence in the wild-type RAGE polypeptide present at a recognition site for furin cleavage of the RAGE polypeptide. For example, in alternate embodiments, the point mutation changes the sequence in the wild-type RAGE polypeptide from one of: (i) PRHRALR to PRHAALR; (ii) PRHRALR to PRHKALR; (iii) PRHRALR to PRHRALA; (iv) PRHRALR to PRHRALK; (v) PRHRALR to PRHRALH; (vi) PRHRALR to PRHRALT; (vii) PRHRALR to PRHHALR; or (viii) PRHRALR to PRHTALR to remove and/or alter a furin cleavage site.

[0185] In other embodiments, the nucleic acid comprises a nucleic acid sequence at least 70%, 75%, 80%, 85%, 90%, 95%, 96%, 97%, 98%, or 99% identical to SEQ ID NO: 202, 203, 204, 205, 206, 207, 208, 209, 210, 211, 212, 213, 214, 215, 216, 217, 218, 219, or 220, wherein the nucleic acid sequence encodes for a fusion protein wherein the RAGE polypeptide portion of the fusion protein comprises: (i) a point mutation or mutations at one or more of residues to remove and/or alter a glycosylation site; and/or (ii) a point mutation at one or more of residues to remove and/or alter a furin cleavage site. In another embodiment, the present invention provides a nucleic acid sequence comprising SEQ ID NO: 202, 203, 204, 205, 206, 207, 208, 209, 210, 211, 212, 213, 214, 215, 216, 217, 218, 219, or 220.

[0186] As described in more detail herein, the RAGE fusion proteins of the present invention may be expressed in cells that are cultured so as to produce purified preparations of the protein. FIG. 7 provides nucleic acid sequences that may be used to encode a RAGE fusion protein of the present invention, wherein SEQ ID NO: 221 comprises a wild-type nucleic acid sequence (i.e., wild type for human RAGE and human immunoglobulin) and a nucleic acid sequence (SEQ ID NO: 222) optimized for cell culture expression. Also, FIG. 8A provides wild-type and modified nucleic acid sequences (SEQ ID NOs: 84 and 85) corresponding to the signal sequence of human RAGE.

[0187] Thus, in certain embodiments, the nucleic acid molecules encoding for the RAGE polypeptides of the invention further encode for signal sequences. As described elsewhere herein, the RAGE polypeptide may comprise the native signal sequence (SEQ ID NO: 83) or signal sequences that have been modified from the native sequence for improved expression in cell culture. Accordingly, the nucleic acid molecules encoding for the RAGE polypeptides of the invention may further comprise the native nucleic acid signal sequence (SEQ ID NO: 84) or nucleic acid signal sequences that have been modified from the native nucleic acid sequence (e.g., SEQ ID NO: 85).

[0188] The fusion protein of the present invention may comprise at least a fragment of a C_{H}2 and C_{H}3 domain of an immunoglobulin. In one embodiment, the fragment of a C_{H}2 and C_{H}3 domain of an immunoglobulin comprises SEQ ID NO: 38. The immunoglobulin peptide may be encoded by the nucleic acid sequence of SEQ ID NO: 39 or SEQ ID NO: 41. The immunoglobulin sequence in SEQ ID NO: 38 or SEQ ID NO: 40 may also be encoded by SEQ ID NO: 52 or SEQ ID NO: 53, where silent base changes for the codons that encode for proline (CCG to CCC) and glycine (GGT to GGG) at the C-terminus of the sequence remove a cryptic RNA splice site near the terminal codon (i.e., nucleotides 622-627 of SEQ ID NO: 39 are modified to generate SEQ ID NO: 52 or nucleotides 652-657 of SEQ ID NO: 41 are modified to generate SEQ ID NO: 53).

[0189] As described above, the RAGE fusion protein may be encoded by a recombinant DNA construct and the method may comprise the step of incorporating the DNA construct into an expression vector. Thus, embodiments of the present invention also comprise expression vectors encoding nucleic acids that encode the RAGE fusion proteins of the present invention. Also, the method may comprise transfecting the expression vector into a host cell. The expression vectors and transfected host cells of the present invention may encode RAGE fusion proteins having each of the embodiments as described herein.

[0190] Thus, in certain embodiments, the invention comprises an expression vector comprising an isolated nucleic acid encoding a fusion protein comprising a RAGE polypeptide linked to an immunoglobulin polypeptide, wherein the RAGE polypeptide comprises a fragment of a mammalian RAGE having a ligand binding domain, and where the fusion protein comprises at least one mutation in at least one of the RAGE polypeptide or the immunoglobulin polypeptide relative to the wild-type sequence, wherein the mutation removes and/or alters at least one of a glycosylation site or an enzyme cleavage site. In certain embodiments, the immunoglobulin polypeptide comprises at least a fragment of a C_{H}2 domain. Also, in certain embodiments, the C_{H}2 domain or fragment thereof does not include the hinge region. Also, in certain embodiments, the enzyme cleavage site is a furin cleavage site.

[0191] Yet other embodiments of the present invention also comprise cells transfected with an expression vector encoding nucleic acid sequences that encode the RAGE fusion proteins of the present invention. Thus, in certain embodiments, the present invention comprises a host cell transfected with an expression vector comprising an isolated nucleic acid encoding a fusion protein comprising a RAGE polypeptide linked to an immunoglobulin polypeptide, wherein the RAGE polypeptide comprises a fragment of a mammalian RAGE having a ligand binding domain, and where the fusion protein has at least one mutation in at least one of the RAGE polypeptide or the immunoglobulin polypeptide relative to the wild-type sequence, wherein the mutation removes and/or alters at least one of a glycosylation site or an enzyme cleavage site. In some embodiments, the immunoglobulin polypeptide comprises at least a fragment of a C_{H}2 domain. Also, in certain embodiments, the C_{H}2 domain or fragment thereof does not include the hinge region. Also, in certain embodiments, the enzyme cleavage site is a furin cleavage site.

[0192] With respect to methods of the invention comprising the incorporation of DNA constructs into an expression vector, plasmids may be constructed to express RAGE-IgG fusion proteins by fusing different lengths of a 5′ cDNA sequence of human RAGE with a 3′ cDNA sequence of a human immunoglobulin polypeptide (e.g., IgG1 Fc (γ1)). The expression cassette sequences may be inserted into an expression vector such as pcDNA3.1 expression vector (Invitrogen, CA) using standard recombinant techniques. Or, other vectors may be used.

[0193] With respect to methods of the invention comprising the transfection of an expression vector into a host cell, RAGE fusion proteins may be expressed in mammalian expression systems, including systems in which the expression constructs are introduced into the mammalian cells using virus such as retrovirus, adenovirus or baculovirus. Mammalian cell lines available as hosts for expression are well known in the art and include many immortalized cell lines available from the American Type Culture Collection (ATCC). These include, inter alia, Chinese hamster ovary (CHO) cells, Human Embryonic Kidney (HEK) 293, NS0, SP2 cells, HeLa cells, baby hamster kidney (BHK) cells, monkey kidney cells (COS), human hepatocellular carcinoma cells (e.g., Hep G2), A549 cells, and a number of other cell lines. In certain embodiments, either CHO or HEK 293 cells are used.

[0194] Cell lines may be selected by determining which cell lines have high expression levels of a RAGE fusion protein. Other cell lines that may be used are insect cell lines, such as Sf9 or Sf21 cells. Plant host cells include, e.g., Nicotiana, Arabidopsis, duckweed, corn, wheat, potato, etc. Bacterial host cells include E. coli and Streptomyces species. Yeast host cells include Schizosaccharomyces pombe, Saccharomyces cerevisiae and Pichia pastoris. When recombinant expression vectors encoding RAGE fusion protein genes are introduced into mammalian host cells, the RAGE fusion proteins are produced by culturing the host cells for a period of time sufficient to allow for expression of the RAGE fusion protein in the host cells or secretion of the RAGE fusion protein into the culture medium in which the host cells are grown. RAGE fusion proteins may be recovered from the culture medium using standard protein purification methods.

[0195] Nucleic acid molecules encoding RAGE fusion proteins and expression vectors comprising these nucleic acid molecules may be used for transfection of a suitable mammalian, plant, bacterial or yeast host cell. Transformation may be by any known method for introducing polynucleotides into a host cell. Methods for introduction of heterologous polynucleotides into mammalian cells are well known in the art and include dextran-mediated transfection, calcium phosphate precipitation, polybrene-mediated transfection, protoplast fusion, electroporation, encapsulation of the polynucleotide(s) in liposomes, and direct microinjection of the DNA into nuclei. Additionally, commercially available transfection agents (e.g., Fugene 6, available from Roche Molecular Biochemicals and Invitrogen) may be used.

[0196] In addition, nucleic acid molecules may be introduced into mammalian cells by viral vectors. Methods of transforming plant cells are well known in the art, including, e.g., Agrobacterium-mediated transformation, biolistic transformation, direct injection, electroporation and viral transformation. Methods of transforming bacterial and yeast cells are also well known in the art.

[0197] An expression vector may also be delivered to an expression system using DNA biolistics, wherein the plasmid is precipitated onto microscopic particles, preferably gold, and the particles are propelled into a target cell or expression system. DNA biolistics techniques are well-known the art and devices, e.g., a “gene gun”, are commercially available for delivery of the microparticles in to a cell (e.g., Helios Gene Gun, Bio-Rad Labs., Hercules, Calif.) and into the skin (PMED Device, PowderMed Ltd., Oxford, UK).

[0198] Expression of RAGE fusion proteins from production cell lines may be enhanced using a number of known techniques. For example, the glutamine synthetase gene expression system (the GS system) and the plasma-encoded neomycin resistance system are common approaches for enhancing expression under certain conditions.

[0199] In certain embodiments, a recombinant expression vector may be transfected into Chinese Hamster Ovary cells (CHO) or HEK cells and expression optimized. In alternate embodiments, the cells may produce 0.1 to 20 grams/liter, or 0.5 to 10 grams/liter, or about 1-2 grams/liter protein.

[0200] As is known in the art, such nucleic acid constructs may be modified by mutation, as for example, by PCR amplification of a nucleic acid template with primers comprising the mutation of interest. In this way, polypeptides comprising varying affinity for RAGE ligands may be designed. In one embodiment, the mutated sequences may be 90% or more identical to the starting DNA. As such, variants may include nucleotide sequences that hybridize under stringent conditions (i.e., equivalent to about 20-27° C. below the melting temperature (TM) of the DNA duplex in 1 molar salt).

[0201] The coding sequence may be expressed by transfecting the expression vector into an appropriate host. For example, the recombinant vectors may be stably transfected into Chinese Hamster Ovary (CHO) cells, and cells expressing the RAGE fusion protein selected and cloned. In an embodiment, cells expressing the recombinant construct are selected for plasmid-encoded neomycin resistance by applying antibiotic G418. Individual clones may be selected and clones expressing high levels of recombinant protein as detected by Western Blot analysis of the cell supernatant may be expanded, and the gene product purified by affinity chromatography using Protein A columns.

[0202] The RAGE fusion proteins of the present invention may comprise improved in vivo stability over RAGE polypeptides not comprising the mutations described herein. The RAGE fusion protein may be further modified to increase stability, efficacy, potency and bioavailability. Thus, the RAGE fusion proteins of the present invention may be modified by post-translational processing or by chemical modification. For example, the RAGE fusion protein may be synthetically prepared to include L-, D-, or unnatural amino acids, alpha-disubstituted amino acids, or N-alkyl amino acids. Additionally, proteins may be modified by acetylation, acylation, ADP-ribosylation, amidation, attachment of lipids such as phosphatidyinositol, formation of disulfide bonds, and the like. Furthermore, polyethylene glycol can be added to increase the biological stability of the RAGE fusion protein.

### Binding of RAGE Antagonists to RAGE Fusion Proteins

[0203] The RAGE fusion proteins of the present invention may be used in a number of applications. For example, the RAGE fusion protein of the present invention may be used in a binding assay to identify RAGE ligands, such as RAGE agonists, antagonists, or modulators.

[0204] For example, in one embodiment, the present invention provides a method for detection of RAGE modulators comprising: (a) providing a RAGE fusion protein of any one of the above embodiments; (b) mixing a compound of interest and a ligand having a known binding affinity for RAGE with the RAGE fusion protein; and (c) measuring binding of the known RAGE ligand to the RAGE fusion protein in the presence of the compound of interest.

[0205] The RAGE fusion proteins may also be used in a kit for the detection of RAGE modulators. For example, in one embodiment, a kit of the present invention may comprise: (a) a compound having known binding affinity to RAGE as a positive control; (b) a RAGE fusion protein of any one of the above embodiments; and (c) instructions for use.

[0206] For example, the RAGE fusion protein may be used in a binding assay to identify potential RAGE ligands essentially as is described in U.S. Pat. No. 6,908,741 incorporated by reference in its entirety herein. In one example embodiment of such a binding assay, a known RAGE ligand may coated onto a solid substrate (e.g., Maxisorb plates) at a concentration of about 5 micrograms per well, where each well contains a total volume of about 100 microliters (μL). The plates may be incubated at 4° C. overnight to allow the ligand to absorb or bind to the substrate. Alternatively, shorter incubation periods at higher temperature (e.g., room temperature) may be used. After a period of time to allow for the ligand to bind to the substrate, the assay wells may be aspirated and a blocking buffer (e.g., 1% BSA in 50 mM imidazole buffer, pH 7.2) may be added to block nonspecific binding. For example, blocking buffer may be added to the plates for 1 hour at room temperature. The plates may then be aspirated and/or washed with a wash buffer. In one embodiment, a buffer comprising 20 mM Imidazole, 150 mM NaCl, 0.05% Tween-20, 5 mM CaCl₂ and 5 mM MgCl₂, pH 7.2 may be used as a wash buffer. The RAGE fusion protein may then added at increasing dilutions to the assay wells. The RAGE fusion protein may then be allowed to incubate with the immobilized ligand in the assay well such that binding can attain equilibrium. In one embodiment, the RAGE fusion protein is allowed to incubate with the immobilized ligand for about one hour at 37° C. In alternate embodiments, longer incubation periods at lower temperatures may be used. After the RAGE fusion protein and immobilized ligand have been incubated, the plate may be washed to remove any unbound RAGE fusion protein. The RAGE fusion protein bound to the immobilized ligand may be detected in a variety of ways. In one embodiment, detection employs an ELISA. Thus, in one embodiment, an immunodetection complex containing a monoclonal mouse anti-human IgG1, biotinylated goat anti-mouse IgG, and an avidin linked alkaline phosphatase may be added to the RAGE fusion protein immobilized in the assay well. The immunodetection complex may be allowed to bind to the immobilized RAGE fusion protein such that binding between the RAGE fusion protein and the immunodetection complex attains equilibrium. For example, the complex may be allowed to bind to the RAGE fusion protein for one hour at room temperature. At that point, any unbound complex may be removed by washing the assay well with wash buffer. The bound complex may be detected by adding the alkaline phosphatase substrate, para-nitrophenylphosphate (PNPP), and measuring conversion of PNPP to para-nitrophenol (PNP) as an increase in absorbance at 405 nm.

[0207] The binding assay of the present invention may be used to quantify ligand binding to RAGE. In an embodiment, RAGE ligands bind to the RAGE fusion protein with nanomolar (nM) or micromolar (μM) affinity. In alternate embodiments, RAGE ligands may bind to the RAGE fusion protein of the present invention with binding affinities ranging from 0.1 to 1000 nanomolar (nM), or from 1 to 500 nM, or from 10 to 80 nM, or ranges within these ranges.

### Modulation of Cellular Effectors

[0208] Embodiments of the RAGE fusion proteins of the present invention may be used to modulate a biological response mediated by RAGE. For example, the RAGE fusion proteins may be designed to modulate RAGE-induced increases in gene expression. Thus, in an embodiment, RAGE fusion proteins of the present invention may be used to modulate the function of biological enzymes. For example, the interaction between RAGE and its ligands may generate oxidative stress and activation of NF-κB, and NF-κB regulated genes, such as the cytokines IL-1β, TNF-α, and the like. In addition, several other regulatory pathways, such as those involving p21ras, MAP kinases, ERK1, and ERK2, have been shown to be activated by binding of AGEs and other ligands to RAGE.

### Physiological Characteristics of RAGE Fusion Proteins

[0209] While sRAGE can have a therapeutic benefit in the modulation of RAGE-mediated diseases, human sRAGE may have limitations as a stand-alone therapeutic based on the relatively short half-life of sRAGE in plasma. For example, whereas rodent sRAGE has a half-life in normal and diabetic rats of approximately 20 hours, human sRAGE has a half-life of less than 2 hours when assessed by retention of immunoreactivity sRAGE (Renard et al., J. Pharmacol. Exp. Ther., 290:1458-1466 (1999)).

[0210] 1. Modification of Immunoglobulin Hinge

[0211] To generate a RAGE therapeutic that has similar binding characteristics as sRAGE, but a more stable pharmacokinetic profile, a RAGE fusion protein comprising a RAGE ligand binding site linked to one or more immunoglobulin domains may be used. As is known in the art, the immunoglobulin domains may include the Fc portion of the immunoglobulin heavy chain.

[0212] The immunoglobulin Fc portion may confer several attributes to a RAGE fusion protein. For example, the Fc fusion protein may increase the serum half-life of such fusion proteins, often from hours to several days. The increase in pharmacokinetic stability is generally a result of the interaction of the linker between C_{H}2 and C_{H}3 regions of the Fc fragment with the FcRn receptor (Wines et al., J. Immunol., 164:5313-5318 (2000)).

[0213] Although a fusion protein comprising an immunoglobulin Fc polypeptide may provide the advantage of increased stability, such fusion proteins may elicit an inflammatory response when introduced into a host. The inflammatory response may be due, in large part, to the Fc portion of the immunoglobulin of the fusion protein. The proinflammatory response may be a desirable feature if the target is expressed on a diseased cell type that needs to be eliminated (e.g., a cancer cell, and/or a population of lymphocytes causing an autoimmune disease). The proinflammatory response may be a neutral feature if the target is a soluble protein, as most soluble proteins do not activate immunoglobulins. However, the proinflammatory response may be a negative feature if the target is expressed on cell types whose destruction would lead to untoward side-effects. Also, the proinflammatory response may be a negative feature if an inflammatory cascade is established at the site of a fusion protein binding to a tissue target, since many mediators of inflammation may be detrimental to surrounding tissue, and/or may cause systemic effects.

[0214] The primary proinflammatory site on immunoglobulin Fc fragments resides on the hinge region between the C_{H}1 and C_{H}2. This hinge region interacts with the FcR1-3 on various leukocytes and trigger these cells to attack the target. (Wines et al., J. Immunol., 164:5313-5318 (2000)).

[0215] As therapeutics for RAGE-mediated diseases, RAGE fusion proteins may not require the generation of an inflammatory response. Thus, embodiments of the RAGE fusion proteins of the present invention may comprise a RAGE fusion protein comprising a RAGE polypeptide linked to an immunoglobulin domain(s) where the Fc hinge region from the immunoglobulin is removed and replaced with a RAGE polypeptide. In this way, interaction between the RAGE fusion protein and Fc receptors on inflammatory cells may be minimized. It may be important, however, to maintain proper stacking and other three-dimensional structural interactions between the various immunoglobulin domains of the RAGE fusion protein. Thus, embodiments of the RAGE fusion proteins of the present invention may substitute the biologically inert, but structurally similar RAGE interdomain linker that separates the V and C1 domains of RAGE, or the linker that separates the C1 and C2 domains of RAGE, in lieu of the normal hinge region of the immunoglobulin heavy chain. Thus, the RAGE polypeptide of the RAGE fusion protein may comprise an interdomain linker sequence that is naturally found downstream of a RAGE immunoglobulin domain to form a RAGE immunoglobulin domain/linker fragment. In this way, the three dimensional interactions between the immunoglobulin domains contributed by either RAGE or the immunoglobulin may be maintained.

[0216] In an embodiment, a RAGE fusion protein of the present invention may comprise a substantial increase in pharmacokinetic stability as compared to sRAGE or as compared to a similar wild type RAGE fusion protein. Thus, in an embodiment, the RAGE fusion proteins of the present invention may be used to antagonize binding of physiological ligands to RAGE as a means to treat RAGE-mediated diseases without generating an unacceptable amount of inflammation. The RAGE fusion proteins of the present invention may exhibit a substantial decrease in generating a proinflammatory response as compared to IgG. Further, the RAGE fusion protein of the present invention may exhibit increased plasma concentration over time relative to a similar wild type RAGE fusion protein.

[0217] 2. Mutations to Remove Glycosylation and Furin Cleavage

[0218] a. Pharmacokinetics

[0219] In certain embodiments, the RAGE fusion proteins of the present invention has at least one mutation relative to the wild-type sequence in at least one of the RAGE polypeptide or the immunoglobulin polypeptide, wherein the mutation removes and/or alters at least one of a glycosylation site or an enzyme cleavage site. For example, the mutation or mutations may remove a furin cleavage site. Additionally and/or alternatively, the mutation or mutations may remove a glycosylation site.

[0220] Furin cleavage has the potential to cleave a RAGE fusion protein at about position 193-198 of a fusion protein comprising two RAGE domains (e.g., having an amino acid sequence as shown in SEQ ID NOs: 32, 33, 34 and 56). As such, in certain embodiments, mutation of a furin cleavage site may be expected to improve the pharmacokinetic profile of the RAGE fusion protein as compared to a wild-type sequence.

[0221] Also, mutation of a glycosylation site in RAGE and/or the immunoglobulin portion of the fusion protein may be able to affect either the stability and/or the pharmacokinetic profile of the protein. As such, in certain embodiments, mutation of a glycosylation site may improve the pharmacokinetic profile of the RAGE fusion protein as compared to a wild-type sequence.

[0222] FIGS. 9-11 illustrate how embodiments of the RAGE fusion proteins of the invention may have improved pharmacokinetic profiles as compared to analogous RAGE fusion proteins having the wild-type sequence. The data in FIGS. 9-10 show the pharmacokinetics and stability of RAGE fusion proteins of the invention in mice after intravenous administration of RAGE fusion proteins at 10 mg/kg. The data in FIG. 11 show in vitro stability of RAGE fusion proteins in plasma. The RAGE fusion proteins used were as follows:

[0223] Batch 1—SEQ ID NO: 56 from CHO cells (wild type);

[0224] Batch 2—SEQ ID NO: 56 from HEK cells (wild type);

[0225] Batch 3—SEQ ID NO: 67 from HEK cells (R198A);

[0226] Batch 4—SEQ ID NO: 71 from HEK cells (R198A and N2Q); and

[0227] Batch 5—SEQ ID NO: 72 from HEK cells (R198A and N58Q).

[0228] As shown in FIG. 9, RAGE fusion proteins having the R198A (Batch 3) and the R198A and N2Q mutations (Batch 4) may remain at higher plasma concentrations over time as compared to other tested RAGE fusion proteins (FIG. 9A and FIG. 9B). This effect may be observed over time periods from 0-336 hours (FIG. 9A) and 0-48 hours (FIG. 9B).

[0229] FIG. 10 shows mean pharmacokinetic parameters for the tested RAGE fusion proteins of Batches 1-5 following intravenous administration to mice (10 mg/kg). It can be seen that overall drug exposure as assessed by the area under the curve (AUC) may be greater in the RAGE fusion proteins having the R198A and N2Q mutations (Batch 4) and the R198A and N58Q mutations (Batch 5) than for wild-type RAGE fusion proteins (Batches 1 and 2) and RAGE fusion proteins having just the R198A mutation (Batch 3).

[0230] Also, in certain embodiments, the total body clearance (Clp) for the RAGE fusion proteins having mutations as compared to wild-type RAGE fusion proteins may differ. Thus, it can be seen that RAGE fusion proteins having the R198A and N2Q mutations (Batch 4) and the R198A and N58Q mutations (Batch 5) have lower total body clearance than for the wild-type RAGE fusion proteins (Batches 1 and 2) and RAGE fusion proteins having just the R198A mutation (Batch 3). Also, in certain embodiments, the steady state volume of distribution (Vss) for the RAGE fusion proteins having the R198A and N2Q mutations (Batch 4) and the R198A and N58Q mutations (Batch 5) may be lower than for Batches 1 and 2 (wild type) and Batch 3 (R198A).

[0231] The higher plasma concentration in vivo may be due to various factors. One factor may be the stability of the fusion protein in plasma (i.e., as compared to active uptake and/or clearance of the RAGE fusion protein). FIG. 11 shows in vitro stability data for the tested RAGE fusion proteins of Batches 1 to 5 described above. It can be seen that in certain embodiments, a RAGE fusion proteins having the R198A and N2Q mutations (Batch 4) has increased stability in plasma as compared to either the wild-type RAGE fusion proteins (Batches 1 and 2) or RAGE fusion proteins having the R198A mutation and, at longer time points, the N58Q and R198A mutations (Batch 5).

[0232] Thus, in certain embodiments, RAGE fusion proteins having both a mutation to remove a furin cleavage site (e.g., R198A) and a mutation to remove and/or reduce glycosylation in the ligand binding domain and/or ligand binding site of RAGE (e.g., N2Q and/or N58Q) may provide improved pharmacokinetic profiles as compared to analogous proteins having the wild-type sequence.

[0233] b. Ligand Binding

[0234] RAGE fusion proteins may act as therapeutic agents by binding to ligands that can interact with RAGE in vivo so as to reduce the potentially deleterious effect(s) of RAGE a ligand(s) in a subject. For example, as discussed in more detail below, RAGE fusion proteins having a ligand binding domain can bind to amyloid-beta so as to reduce, and in some embodiments reverse, plaque formation in Alzheimer's Disease.

[0235] Glycosylation of RAGE has the potential to reduce ligand binding (see e.g., Owasa et al., Biochimica et Biophysica Acta, 1770: 1468-1474 (2007)). Initial studies with wild-type RAGE fusion proteins (e.g., SEQ ID NOs: 32, 33, 34 and 56) cultured under various conditions indicated that RAGE fusion proteins cultured under conditions to reduce glycosylation, e.g., in the presence of tunicamycin (to inhibit the glycosyltransferase that transfers N-acetylglucosamine-1-phosphate (P-GlcNAc) from UDP-N-acetylglucosamine to dolichol phosphate in the first step of glycoprotein synthesis), and/or grown in 2-deoxy-D-glucose (e.g., to inhibit hexokinase and glucose phosphoisomerase so as to reduce glycosylation mediated by these enzymes), could result in an increase of RAGE fusion protein having an increase in 0-glycan and 1-glycan occupancy with a loss of 2-glycan and 3-glycan occupancy as measured by reverse phase high pressure liquid chromatography (RP-HPLC) and liquid chromatography mass spectrometry (LC-MS). For example, it was found that for RAGE fusion protein expressed from cells cultured in the presence of tunicamycin, there was a decrease in glycosylation from a population of RAGE fusion proteins exhibiting about 67% 3-glycan and 22% 2 glycan, to a population of RAGE fusion proteins exhibiting about 42% 3-glycan, 16% 2-glycan, and 31% 0-glycan. When RAGE fusion proteins were isolated from RP-HPLC peaks corresponding to either the 3-glycan, 2-glycan or 0 glycan RAGE fusion proteins, it was found that the 0-glycan RAGE fusion protein exhibited an increase in binding of 529% as compared to the control RAGE fusion protein (i.e., mixture of 67% 3-glycan and 22% 2 glycan RAGE fusion protein) having a relative binding of 100% (data not shown). The increase in binding found for the 0-glycan RAGE fusion protein was even greater when compared to binding seen with the 3 glycan fraction (i.e., about a 10× increase in binding) (data not shown).

[0236] FIG. 12 provides data showing the relative binding for various RAGE fusion protein mutants. It can be seen that the N2Q mutation of the RAGE fusion protein significantly improves binding of ligands (S100b) to the RAGE fusion protein as shown for both the N2Q, R198A mutant and the N2Q, N288Q, R198A mutants. Interestingly, the N2Q, R198A mutant was the construct that displayed significantly improved pharmacokinetic half-life and stability in plasma (FIGS. 9-11).

Treatment of Disease with RAGE Fusion Proteins

[0237] The present invention also comprises methods for the treatment of RAGE-mediated disorder in a human subject. In an embodiment, the method may comprise administering to a subject a RAGE fusion protein comprising a RAGE fusion protein of any one of the previous embodiments.

[0238] The RAGE fusion protein may be administered as a pharmaceutical formulation. The pharmaceutical formulation may comprise a RAGE fusion protein, a lyoprotectant, and a buffer.

[0239] A variety of animal models have been used to validate the use of compounds that modulate RAGE as therapeutics. Examples of these models are as follows:
[0240] a) sRAGE inhibited neointimal formation in a rat model of restenosis following arterial injury in both diabetic and normal rats by inhibiting endothelial, smooth muscle and macrophage activation via RAGE (Zhou et al., Circulation 107:2238-2243 (2003));
[0241] b) Inhibition of RAGE/ligand interactions, using either sRAGE or an anti-RAGE antibody, reduced amyloid plaque formation in a mouse model of systemic amyloidosis (Yan et al., Nat. Med., 6:643-651 (2000)). Accompanying the reduction in amyloid plaques was a reduction in the inflammatory cytokines, interleukin-6 (IL-6) and macrophage colony stimulating factor (M-CSF) as well as reduced activation of NF-kB in the treated animals;
[0242] c) RAGE transgenic mice (RAGE overexpressers and RAGE dominant negative expressers) exhibit plaque formation and cognitive deficits in a mouse model of AD (Arancio et al., EMBO J., 23:4096-4105 (2004));
[0243] d) Treatment of diabetic rats with sRAGE reduced vascular permeability (Bonnardel-Phu et al., Diabetes, 48:2052-2058 (1999));
[0244] e) Treatment with sRAGE reduced atherosclerotic lesions in diabetic apolipoprotein E-null mice and prevented the functional and morphological indices of diabetic nephropathy in db/db mice (Hudson et al., Arch. Biochem. Biophys., 419:80-88 (2003)); and
[0245] f) sRAGE attenuated the severity of inflammation in a mouse model of collagen-induced arthritis (Hofmann et al., Genes Immunol., 3:123-135 (2002)), a mouse model of experimental allergic encephalomyelitis (Yan et al., Nat. Med. 9:28-293 (2003)) and a mouse model of inflammatory bowel disease (Hofmann et al., Cell, 97:889-901 (1999)).

[0246] Thus, in an embodiment, the RAGE fusion proteins of the present invention may be used to treat a symptom of diabetes and/or complications resulting from diabetes mediated by RAGE. In alternate embodiments, the symptom of diabetes or diabetic late complications may comprise diabetic nephropathy, diabetic retinopathy, a diabetic foot ulcer, a cardiovascular complication of diabetes, or diabetic neuropathy.

[0247] Originally identified as a receptor for molecules whose expression is associated with the pathology of diabetes, RAGE itself is essential to the pathophysiology of diabetic complications. In vivo, inhibition of RAGE interaction with its ligand(s) has been shown to be therapeutic in multiple models of diabetic complications and inflammation (Hudson et al., Arch. Biochem. Biophys., 419:80-88 (2003)). For example, a two-month treatment with anti-RAGE antibodies normalized kidney function and reduced abnormal kidney histopathology in diabetic mice (Flyvbjerg et al., Diabetes 53:166-172 (2004)). Furthermore, treatment with a soluble form of RAGE (sRAGE) which binds to RAGE ligands and inhibits RAGE/ligand interactions, reduced atherosclerotic lesions in diabetic apolipoprotein E-null mice and attenuated the functional and morphological pathology of diabetic nephropathy in db/db mice (Bucciarelli et al., Circulation 106:2827-2835 (2002)).

[0248] Also, it has been shown that nonenzymatic glycoxidation of macromolecules ultimately resulting in the formation of advanced glycation endproducts (AGEs) is enhanced at sites of inflammation, in renal failure, in the presence of hyperglycemia and other conditions associated with systemic or local oxidant stress (Dyer et al., J. Clin. Invest., 91:2463-2469 (1993); Reddy et al., Biochem., 34:10872-10878 (1995); Dyer et al., J. Biol. Chem., 266:11654-11660 (1991); Degenhardt et al., Cell Mol. Biol., 44:1139-1145 (1998)). Accumulation of AGEs in the vasculature can occur focally, as in the joint amyloid composed of AGE-β₂-microglobulin found in patients with dialysis-related amyloidosis (Miyata et al., J. Clin. Invest., 92:1243-1252 (1993); Miyata et al., J. Clin. Invest., 98:1088-1094 (1996)), or generally, as exemplified by the vasculature and tissues of patients with diabetes (Schmidt et al., Nature Med., 1:1002-1004 (1995)). The progressive accumulation of AGEs over time in patients with diabetes suggests that endogenous clearance mechanisms are not able to function effectively at sites of AGE deposition. Such accumulated AGEs have the capacity to alter cellular properties by a number of mechanisms. Although RAGE is expressed at low levels in normal tissues and vasculature, in an environment where the receptor's ligands accumulate, it has been shown that RAGE becomes upregulated (Li et al., J. Biol. Chem., 272:16498-16506 (1997); Li et al., J. Biol. Chem., 273:30870-30878 (1998); Tanaka et al., J. Biol. Chem., 275:25781-25790 (2000)). RAGE expression is increased in endothelium, smooth muscle cells and infiltrating mononuclear phagocytes in diabetic vasculature. Also, studies in cell culture have demonstrated that AGE-RAGE interaction causes changes in cellular properties important in vascular homeostasis.

[0249] In other embodiments, the RAGE fusion proteins of the present invention may also be used to treat or reverse amyloidoses and Alzheimer's disease. RAGE is a receptor for amyloid beta (Aβ) as well as other amyloidogenic proteins including SAA and amylin (Yan et al., Nature, 382:685-691 (1996); Yan et al., Proc. Natl. Acad. Sci., USA, 94:5296-5301 (1997); Yan et al., Nat. Med., 6:643-651 (2000); Sousa et al., Lab Invest., 80:1101-1110 (2000)). Also, the RAGE ligands, including AGEs, S100b and Aβ proteins, are found in tissue surrounding the senile plaque in man (Luth et al., Cereb. Cortex 15:211-220 (2005); Petzold et al, Neurosci. Lett., 336:167-170 (2003); Sasaki et al., Brain Res., 12:256-262 (2001; Yan et al., Restor. Neurol Neurosci., 12:167-173 (1998)). It has been shown that RAGE binds β-sheet fibrillar material regardless of the composition of the subunits (amyloid-β peptide, amylin, serum amyloid A, prion-derived peptide) (Yan et al., Nature, 382:685-691 (1996); Yan et al., Nat. Med., 6:643-651 (2000)). In addition, deposition of amyloid has been shown to result in enhanced expression of RAGE. For example, in the brains of patients with Alzheimer's disease (AD), RAGE expression increases in neurons and glia (Yan, et al., Nature 382:685-691 (1996)). Concurrent with expression of RAGE ligands, RAGE is upregulated in astrocytes and microglial cells in the hippocampus of individuals with AD but is not upregulated in individuals that do not have AD (Lue et al., Exp. Neurol., 171:29-45 (2001)). These findings suggest that cells expressing RAGE are activated via RAGE/RAGE ligand interactions in the vicinity of the senile plaque. Also, in vitro, Aβ-mediated activation of microglial cells can be blocked with antibodies directed against the ligand-binding domain of RAGE (Yan et al., Proc. Natl. Acad. Sci., USA, 94:5296-5301 (1997)). It has also been demonstrated that RAGE can serve as a focal point for fibril assembly (Deane et al., Nat. Med. 9:907-913 (2003)).

[0250] Also, in vivo inhibition of RAGE/ligand interactions using either sRAGE or an anti-RAGE antibody can reduce amyloid plaque formation in a mouse model of systemic amyloidosis (Yan et al., Nat. Med., 6:643-651 (2000)). Double transgenic mice that over-express human RAGE and human amyloid precursor protein (APP) with the Swedish and London mutations (mutant hAPP) in neurons develop learning defects and neuropathological abnormalities earlier than their single mutant hAPP transgenic counterparts. In contrast, double transgenic mice with diminished Aβ signaling capacity due to neurons expressing a dominant negative form of RAGE on the same mutant hAPP background, show a delayed onset of neuropathological and learning abnormalities compared to their single APP transgenic counterpart (Arancio et al., EMBO J., 23:4096-4105 (2004)).

[0251] In addition, inhibition of RAGE-amyloid interaction has been shown to decrease expression of cellular RAGE and cell stress markers (as well as NF-κB activation), and diminish amyloid deposition (Yan et al., Nat. Med., 6:643-651 (2000)) suggesting a role for RAGE-amyloid interaction in both perturbation of cellular properties in an environment enriched for amyloid (even at early stages) as well as in amyloid accumulation.

[0252] Thus, the RAGE fusion proteins of the present invention may also be used to reduce amyloidosis and to reduce amyloid plaques and cognitive dysfunction associated with Alzheimer's Disease (AD). As described above, sRAGE has been shown to reduce both amyloid plaque formation in the brain and subsequent increase in inflammatory markers in an animal model of AD. In studies using a mouse model of Alzheimer's Disease, it has been shown that RAGE antagonists can reverse the formation of plaques and the loss of cognition. In U.S. Patent Publication No. US 2005/0026811, small molecule RAGE antagonists were used to inhibit the progression of Aβ deposition and reduced the volume of preexisting plaques in Alzheimer's Disease mice (US 2005/0026811 at ¶¶581-586). Furthermore, treatment with such small molecule RAGE antagonists improved cognition in these Alzheimer's Disease mouse models (US 2005/0026811 at ¶¶587-590). Thus, in a mouse model of Alzheimer's Disease, those mice who had developed Aβ plaques and cognitive loss and were treated with small molecule RAGE antagonists exhibited a reduction in plaque volume and an improvement in cognitive performance as compared to those Alzheimer's Disease mice who were not treated with the small molecule RAGE antagonists, showing that the RAGE antagonist compounds may delay or slow loss of cognitive performance, or may improve cognitive performance of a subject suffering from dementia of Alzheimer's type.

[0253] Also, it had been shown in both cellular assays and in animal studies that RAGE mediates the transcytosis of circulating Aβ across the blood-brain barrier (BBB). Such increased transcytosis of Aβ results in neuronal oxidant stress and sustained reductions in cerebral blood flow. The effects of RAGE can be inhibited by a RAGE modulator (e.g., anti-RAGE antibody or sRAGE) (see e.g., Mackic et al., J. Clin. Invest., 102:734-743 (1998); see also Kumar et al., Neurosci., Program, p 141 (2000)). These finding were confirmed by additional studies (see e.g., U.S. Pat. No. 6,825,164 at col. 17, line 48 to col. 18, line 43; Deane et al., Nature Medicine, 9:907-913 (2003)). Reduced cerebral perfusion can promote ischemic lesions which can act synergistically with Aβ to exacerbate dementia. Also, insufficient cerebral blood flow may alter Aβ trafficking across the blood brain barrier thereby reducing Aβ clearance and promoting accumulation of Aβ in brain (see Girouard and Iadecola, J. Appl. Physiol., 100, 328-335 (2006) at page 332). Thus, the increase in cerebral blood flow promoted by RAGE antagonists may reduce the symptoms or delay onset of development of Alzheimer's Disease, or both. For example, RAGE antagonists may delay or slow loss of cognitive performance, or may improve cognitive performance of a subject suffering from dementia of Alzheimer's type, or both.

[0254] Alzheimer's Disease may be diagnosed by NINCDS and DSM criteria, Mini-Mental State Examination, and Clinical Dementia Rating within particular limits. One aspect of the present invention includes improving cognitive performance comprising administering a RAGE fusion protein of the present invention. Cognitive performance may be assessed with the cognitive subscale of the Alzheimer's Disease Assessment Scale (ADAS-cog), as is known in the art, which scores cognitive function on a 0 to 70 scale, with higher scores indicating greater cognitive impairment. Thus, a reduction in score demonstrates cognitive improvement. One aspect of the present invention includes administering to a subject a RAGE fusion protein of the present invention to reduce an ADAS-cog score of a subject. The subject may be a human be suffering from dementia of Alzheimer's type, mild to moderate Alzheimer's Diseases, or severe Alzheimer's Disease.

[0255] In addition, the progression of Alzheimer's Disease may also be assessed in a human through examination of four areas of function: General, Cognitive, Behavioral, and Activities of Daily Living. Such an assessment may be performed using a Clinician's Interview Based Impression of Change (CIBIC or CIBIC plus). One aspect of the present invention includes improvement in subject's function comprising administering a RAGE fusion protein of the present invention. In one embodiment, the subject's function is one or more of general, cognitive, behavioral, and activities of daily living.

[0256] In another embodiment, the RAGE fusion proteins of the present invention may be used to treat dementia associated with head trauma. In an embodiment, the cognitive performance of the subject is improved. In another embodiment, the cognitive performance of the subject is maintained. In another embodiment, the rate of loss of cognitive performance of the subject is slowed.

[0257] Also, RAGE fusion proteins of the present invention may be used to treat atherosclerosis and other cardiovascular disorders. Thus, it has been shown that ischemic heart disease is particularly high in patients with diabetes (Robertson, et al., Lab Invest., 18:538-551 (1968); Kannel et al, J. Am. Med. Assoc., 241:2035-2038 (1979); Kannel et al., Diab. Care, 2:120-126 (1979)). In addition, studies have shown that atherosclerosis in patients with diabetes is more accelerated and extensive than in patients not suffering from diabetes (see e.g. Waller et al., Am. J. Med., 69:498-506 (1980); Crall et al, Am. J. Med. 64:221-230 (1978); Hamby et al., Chest, 2:251-257 (1976); and Pyorala et al., Diab. Metab. Rev., 3:463-524 (1978)). Although the reasons for accelerated atherosclerosis in the setting of diabetes are many, it has been shown that reduction of AGEs can reduce plaque formation.

[0258] In another embodiment, the RAGE fusion proteins of the present invention may be used to treat cancer. In one embodiment, the cancer treated using the RAGE fusion proteins of the present invention comprises cancer cells that express RAGE. For example, cancers that may be treated with the RAGE fusion protein of the present invention include some lung cancers, some gliomas, some papillomas, and the like. Amphoterin is a high mobility group I nonhistone chromosomal DNA binding protein (Rauvala et al., J. Biol. Chem., 262:16625-16635 (1987); Parkikinen et al., J. Biol. Chem. 268:19726-19738 (1993)) which has been shown to interact with RAGE. It has been shown that amphoterin promotes neurite outgrowth, as well as serving as a surface for assembly of protease complexes in the fibrinolytic system (also known to contribute to cell mobility). In addition, a local tumor growth inhibitory effect of blocking RAGE has been observed in a primary tumor model (C6 glioma), the Lewis lung metastasis model (Taguchi et al., Nature 405:354-360 (2000)), and spontaneously arising papillomas in mice expressing the v-Ha-ras transgene (Leder et al., Proc. Natl. Acad. Sci., 87:9178-9182 (1990)).

[0259] In yet another embodiment, the RAGE fusion proteins of the present invention may be used to treat inflammation. In alternate embodiments, the RAGE fusion proteins of the present invention may be used to treat inflammation associated with inflammatory bowel disease, inflammation associated with rheumatoid arthritis, inflammation associated with psoriasis, inflammation associated with multiple sclerosis, inflammation associated with hypoxia, inflammation associated with stroke, inflammation associated with heart attack, inflammation associated with hemorrhagic shock, inflammation associated with sepsis, inflammation associated with organ transplantation, inflammation associated with impaired wound healing, or inflammation associated with rejection of self (e.g., autoimmune) or non-self (e.g., transplanted) cells, tissue, or organs.

[0260] For example, following thrombolytic treatment, inflammatory cells such as granulocytes infiltrate the ischemic tissue and produce oxygen radicals that can destroy more cells than were killed by the hypoxia. Inhibiting the receptor on the neutrophil responsible for the neutrophils being able to infiltrate the tissue with antibodies or other protein antagonists has been shown to ameliorate the response. Since RAGE is a ligand for this neutrophil receptor, a RAGE fusion protein containing a fragment of RAGE may act as a decoy and prevent the neutrophil from trafficking to the reperfused site and thus prevent further tissue destruction. The role of RAGE in prevention of inflammation may be indicated by studies showing that sRAGE inhibited neointimal expansion in a rat model of restenosis following arterial injury in both diabetic and normal rats, presumably by inhibiting endothelial, smooth muscle cell proliferation and macrophage activation via RAGE (Zhou et al., Circulation, 107:2238-2243 (2003)). In addition, sRAGE inhibited models of inflammation including delayed-type hypersensitivity, experimental autoimmune encephalitis and inflammatory bowel disease (Hofman et al., Cell, 97:889-901 (1999)).

[0261] In an embodiment, the RAGE fusion proteins of the present invention may be used to treat autoimmune based disorders. For example, in an embodiment, the RAGE fusion proteins of the present invention may be used to treat kidney failure. Thus, the RAGE fusion proteins of the present invention may be used to treat systemic lupus nephritis or inflammatory lupus nephritis. For example, the S100/calgranulins have been shown to comprise a family of closely related calcium-binding polypeptides characterized by two EF-hand regions linked by a connecting peptide (Schafer et al., TIBS, 21:134-140 (1996); Zimmer et al., Brain Res. Bull., 37:417-429 (1995); Rammes et al., J. Biol. Chem., 272:9496-9502 (1997); Lugering et al., Eur. J. Clin. Invest., 25:659-664 (1995)). Although they lack signal peptides, it has long been known that S100/calgranulins gain access to the extracellular space, especially at sites of chronic immune/inflammatory responses, as in cystic fibrosis and rheumatoid arthritis. RAGE is a receptor for many members of the S100/calgranulin family, mediating their proinflammatory effects on cells such as lymphocytes and mononuclear phagocytes. Also, studies on delayed-type hypersensitivity response, colitis in IL-10 null mice, collagen-induced arthritis, and experimental autoimmune encephalitis models suggest that RAGE-ligand interaction (presumably with S-100/calgranulins) has a proximal role in the inflammatory cascade.

[0262] In an embodiment, the RAGE fusion proteins of the present invention may be used to treat restenosis. In an embodiment, the subject is suffering from diabetes.

[0263] Type I diabetes is an autoimmune disorder that may be prevented or ameliorated by treatment with the RAGE fusion proteins of the present invention. For example, it has been shown that sRAGE may allow for the transfer of splenocytes from non-obese diabetic (NOD) mice to NOD-mice with severe combined immunodeficiency (NOD-scid mice). NOD-scid mice do not display diabetes spontaneously, but require the presence of immunocytes capable of destroying islet cells such that diabetes is then induced. It was found that NOD-scid recipients treated with sRAGE displayed reduced onset of diabetes induced by splenocytes transferred from a diabetic (NOD) mouse as compared to NOD-scid recipients not treated with sRAGE (U.S. Patent Publication 2002/0122799). As stated in US 2002/0122799, the experimental results using sRAGE in this model are relevant to human disease such as clinical settings in which future immune therapies and islet transplantation may occur.

[0264] Thus, in an embodiment, a RAGE fusion protein of the present invention may be used to treat inflammation associated with transplantation of at least one of an organ, a tissue, or a plurality of cells from a first site to a second site. The first and second sites may be in different subjects, or in the same subject. In alternate embodiments, the transplanted cells, tissue or organ comprise cells of a pancreas, skin, liver, kidney, heart, lung, bone marrow, blood, bone, muscle, endothelial cells, artery, vein, cartilage, thyroid, nervous system, or stem cells. For example, administration of the RAGE fusion proteins of the present invention may be used to facilitate transplantation of islet cells from a first non-diabetic subject to a second diabetic subject.

[0265] In another embodiment, the present invention may provide a method of treating osteoporosis by administering to a subject an amount of a RAGE fusion protein of the present invention. (Zhou et al., J. Exp. Med., 203:1067-1080 (2006)). In an embodiment, the method of treating osteoporosis may further comprise the step of increasing bone density of the subject or reducing the rate of decrease in bone density of a subject.

[0266] Thus, in various selected embodiments, the present invention may provide a method for inhibiting the interaction of an AGE with RAGE in a subject by administering to the subject an amount of a RAGE fusion protein of the present invention sufficient to inhibit this interaction. The subject treated using the RAGE fusion proteins of the present invention may be an animal. In an embodiment, the subject is a human. The subject may be suffering from an AGE-related disease such as diabetes, diabetic complications such as nephropathy, neuropathy, retinopathy, foot ulcer, amyloidoses, or renal failure, and inflammation. Or, the subject may be an individual with Alzheimer's disease. In an alternative embodiment, the subject may be an individual with cancer. In yet other embodiments, the subject may be suffering from systemic lupus erythmetosis or inflammatory lupus nephritis. Other diseases may be mediated by RAGE and thus, may be treated using the RAGE fusion proteins of the present invention. Thus, in additional alternative embodiments of the present invention, the RAGE fusion proteins may be used for treatment of Crohn's disease, arthritis, vasculitis, nephropathies, retinopathies, and neuropathies in human or animal subjects. In other embodiments, inflammation involving both autoimmune responses (e.g., rejection of self) and non-autoimmune responses (e.g., rejection of non-self) may be mediated by RAGE and thus, may be treated using the RAGE fusion proteins of the present invention.

[0267] As described above, the present invention relates to a RAGE fusion protein of any of the previous embodiments for inhibiting the interaction of an AGE with RAGE in a subject by administering to the subject an amount of a RAGE fusion protein of the present invention sufficient to inhibit this interaction. In an embodiment, the RAGE fusion protein may be used in medicine for treatment of a RAGE-mediated disorder or disease.

[0268] Thus, embodiments of the present invention also relate to the use of a RAGE fusion protein for the treatment of any one or several of the following conditions: diabetes or diabetic late complications, osteoporosis, amyloidosis, Alzheimer's disease, cancer, kidney failure, or inflammation associated with autoimmunity, inflammatory bowel disease, rheumatoid arthritis, psoriasis, multiple sclerosis, hypoxia, stroke, heart attack, hemorrhagic shock, sepsis, organ transplantation, or impaired wound healing.

[0269] The present invention also relates to the use of a RAGE fusion protein in the manufacture of a medicament for the treatment of any one or several of diabetes or diabetic late complications, osteoporosis, amyloidosis, Alzheimer's disease, cancer, kidney failure, or inflammation associated with autoimmunity, inflammatory bowel disease, rheumatoid arthritis, psoriasis, multiple sclerosis, hypoxia, stroke, heart attack, hemorrhagic shock, sepsis, organ transplantation, or impaired wound healing.

[0270] A therapeutically effective amount may comprise an amount which is capable of inhibiting and/or preventing the interaction of RAGE with an AGE or other types of endogenous RAGE ligands in a subject. Accordingly, the amount will vary with the subject being treated. Administration of the compound may be hourly, daily, weekly, monthly, yearly, or as a single event. In various alternative embodiments, the therapeutically effective amount of the RAGE fusion protein may range from about 1 ng/kg body weight to about 100 mg/kg body weight, or from about 10 μg/kg body weight to about 50 mg/kg body weight, or from about 100 μg/kg body weight to about 20 mg/kg body weight. The actual effective amount may be established by dose/response assays using methods standard in the art (Johnson et al., Diabetes. 42: 1179, (1993)). Thus, as is known to those in the art, the effective amount may depend on bioavailability, bioactivity, and biodegradability of the compound.

### Compositions

[0271] The present invention may comprise a composition comprising a RAGE fusion protein of any one of the previous embodiments and a pharmaceutically acceptable carrier.

[0272] Pharmaceutically acceptable carriers may comprise any of the standard pharmaceutically accepted carriers known in the art. In one embodiment, the pharmaceutical carrier may be a liquid and the RAGE fusion protein or nucleic acid construct formulation may be in the form of a solution. In another embodiment, the pharmaceutically acceptable carrier may be a solid in the form of a powder, a lyophilized powder, or a tablet. Or, the pharmaceutical carrier may be a gel, suppository, or cream. In alternate embodiments, the carrier may comprise a liposome, a microcapsule, a polymer encapsulated cell, or a virus. Thus, the term pharmaceutically acceptable carrier encompasses, but is not limited to, any of the standard pharmaceutically accepted carriers, such as water, alcohols, phosphate buffered saline solution, sugars (e.g., sucrose or mannitol), oils or emulsions such as oil/water emulsions or a triglyceride emulsion, various types of wetting agents, tablets, coated tablets and capsules.

[0273] In certain embodiments, the RAGE fusion proteins may be present in a neutral form (including zwitter ionic forms) or as a positively or negatively-charged species. In some embodiments, the RAGE fusion proteins may be complexed with a counterion to form a pharmaceutically acceptable salt.

[0274] The terms “pharmaceutically acceptable salt” refer to a complex comprising one or more RAGE fusion proteins and one or more counterions, where the counterions are derived from pharmaceutically acceptable inorganic and organic acids and bases.

[0275] Pharmaceutically acceptable inorganic bases include metallic ions. More preferred metallic ions include, but are not limited to, appropriate alkali metal salts, alkaline earth metal salts and other physiological acceptable metal ions. Salts derived from inorganic bases include aluminum, ammonium, calcium, cobalt, nickel, molybdenum, vanadium, manganese, chromium, selenium, tin, copper, ferric, ferrous, lithium, magnesium, manganic salts, manganous, potassium, rubidium, sodium, and zinc, and in their usual valences.

[0276] Pharmaceutically acceptable acid addition salts of the RAGE fusion proteins of the present invention can be prepared from the following acids, including, without limitation formic, acetic, acetamidobenzoic, adipic, ascorbic, boric, propionic, benzoic, camphoric, carbonic, cyclamic, dehydrocholic, malonic, edetic, ethylsulfuric, fendizoic, metaphosphoric, succinic, glycolic, gluconic, lactic, malic, tartaric, tannic, citric, nitric, ascorbic, glucuronic, maleic, folic, fumaric, propionic, pyruvic, aspartic, glutamic, benzoic, hydrochloric, hydrobromic, hydroiodic, lysine, isocitric, trifluoroacetic, pamoic, propionic, anthranilic, mesylic, orotic, oxalic, oxalacetic, oleic, stearic, salicylic, aminosalicylic, silicate, p-hydroxybenzoic, nicotinic, phenylacetic, mandelic, embonic, sulfonic, methanesulfonic, phosphoric, phosphonic, ethanesulfonic, ethanedisulfonic, ammonium, benzenesulfonic, pantothenic, naphthalenesulfonic, toluenesulfonic, 2-hydroxyethanesulfonic, sulfanilic, sulfuric, nitric, nitrous, sulfuric acid monomethyl ester, cyclohexylaminosulfonic, β-hydroxybutyric, glycine, glycylglycine, glutamic, cacodylate, diaminohexanoic, camphorsulfonic, gluconic, thiocyanic, oxoglutaric, pyridoxal 5-phosphate, chlorophenoxyacetic, undecanoic, N-acetyl-L-aspartic, galactaric and galacturonic acids.

[0277] Pharmaceutically acceptable organic bases include trimethylamine, diethylamine, N,N′-dibenzylethylenediamine, chloroprocaine, choline, dibenzylamine, diethanolamine, ethylenediamine, meglumine (N-methylglucamine), procaine, cyclic amines, quaternary ammonium cations, arginine, betaine, caffeine, clemizole, 2-ethylaminoethanol, 2-diethylaminoethanol, 2-dimethylaminoethanol, ethanediamine, butylamine, ethanolamine, ethylenediamine, N-ethylmorpholine, N-ethylpiperidine, ethylglucamine, glucamine, glucosamine, histidine, hydrabamine, imidazole, isopropylamine, methylglucamine, morpholine, piperazine, pyridine, pyridoxine, neodymium, piperidine, polyamine resins, procaine, purines, theobromine, triethylamine, tripropylamine, triethanolamine, tromethamine, methylamine, taurine, cholate, 6-amino-2-methyl-2-heptanol, 2-amino-2-methyl-1,3-propanediol, 2-amino-2-methyl-1-propanol, aliphatic mono- and dicarboxylic acids, phenyl-substituted alkanoic acids, hydroxy alkanoic acids, aromatic acids, aliphatic and aromatic sulfonic acids, strontium, tricine, hydrazine, phenylcyclohexylamine, 2-(N-morpholino)ethanesulfonic acid, bis(2-hydroxyethyl)amino-tris(hydroxymethyl)methane, N-(2-acetamido)-2-aminoethanesulfonic acid, 1,4-piperazinediethanesulfonic acid, 3-morpholino-2-hydroxypropanesulfonic acid, 1,3-bis[tris(hydroxymethyl)methylamino]propane, 4-morpholinepropanesulfonic acid, 4-(2-hydroxyethyl)piperazine-1-ethanesulfonic acid, 2-[(2-hydroxy-1,1-bis(hydroxymethyl)ethyl)amino]ethanesulfonic acid, N,N-bis(2-hydroxyethyl)-2-aminoethanesulfonic acid, 4-(N-morpholino)butanesulfonic acid, 3-(N,N-bis[2-hydroxyethyl]amino)-2-hydroxypropanesulfonic acid, 2-hydroxy-3-[tris(hydroxymethyl)methylamino]-1-propanesulfonic acid, 4-(2-hydroxyethyl)piperazine-1-(2-hydroxypropanesulfonic acid), piperazine-1,4-bis(2-hydroxypropanesulfonic acid)dihydrate, 4-(2-hydroxyethyl)-1-piperazinepropanesulfonic acid, N,N-bis(2-hydroxyethyl)glycine, N-(2-hydroxyethyl)piperazine-N′-(4-butanesulfonic acid), N-[tris(hydroxymethyl)methyl]-3-aminopropanesulfonic acid, N-tris(Hydroxymethyl)methyl-4-aminobutanesulfonic acid, N-(1,1-dimethyl-2-hydroxyethyl)-3-amino-2-hydroxypropanesulfonic acid, 2-(cyclohexylamino)ethanesulfonic acid, 3-(cyclohexylamino)-2-hydroxy-1-propanesulfonic acid, 3-(cyclohexylamino)-1-propanesulfonic acid, N-(2-acetamido)iminodiacetic acid, 4-(cyclohexylamino)-1-butanesulfonic acid, N-[tris(hydroxymethyl)methyl]glycine, 2-amino-2-(hydroxymethyl)-1,3-propanediol, and trometamol.

[0278] In a further aspect of the present invention, the RAGE fusion proteins of the invention may be utilized in adjuvant therapeutic or combination therapeutic treatments with other known therapeutic agents. The following is a non-exhaustive listing of adjuvants and additional therapeutic agents which may be utilized in combination with the RAGE fusion protein modulators of the present invention:

[0279] Pharmacologic Classifications of Anticancer Agents:
[0280] 1. Alkylating agents: Cyclophosphamide, nitrosoureas, carboplatin, cisplatin, procarbazine
[0281] 2. Antibiotics: Bleomycin, Daunorubicin, Doxorubicin
[0282] 3. Antimetabolites: Methotrexate, Cytarabine, Fluorouracil, Azathioprine, 6-Mercaptopurine, and cytotoxic cancer chemotherapeutic agents
[0283] 4. Plant alkaloids: Vinblastine, Vincristine, Etoposide, Paclitaxel,
[0284] 5. Hormones: Tamoxifen, Octreotide acetate, Finasteride, Flutamide
[0285] 6. Biologic response modifiers: Interferons, Interleukins

[0286] Pharmacologic Classifications of Treatment for Rheumatoid Arthritis
[0287] 1. Analgesics: Aspirin
[0288] 2. NSAIDs (Nonsteroidal anti-inflammatory drugs): Ibuprofen, Naproxen, Diclofenac
   [0289] 3. DMARDs (Disease-Modifying Antirheumatic drugs): Methotrexate, gold preparations, hydroxychloroquine, sulfasalazine
[0290] 4. Biologic Response Modifiers, DMARDs: Etanercept, Infliximab Glucocorticoids, such as beclomethasone, methylprednisolone, betamethasone, prednisone, dexamethasone, and hydrocortisone

[0291] Pharmacologic Classifications of Treatment for Diabetes Mellitus
[0292] 1. Sulfonylureas: Tolbutamide, Tolazamide, Glyburide, Glipizide
[0293] 2. Biguanides: Metformin
[0294] 3. Miscellaneous oral agents: Acarbose, Troglitazone
[0295] 4. Insulin

[0296] Pharmacologic Classifications of Treatment for Alzheimer's Disease
[0297] 1. Cholinesterase Inhibitor: Tacrine, Donepezil
[0298] 2. Antipsychotics: Haloperidol, Thioridazine
[0299] 3. Antidepressants: Desipramine, Fluoxetine, Trazodone, Paroxetine
[0300] 4. Anticonvulsants: Carbamazepine, Valproic acid

[0301] In an embodiment, the compositions of the present invention may comprise an amount of a RAGE fusion protein in combination with a single or multiple additional therapeutic agents. In addition to the agents heretofore described, the following therapeutic agents may be used in combination with the RAGE fusion proteins of the present invention: immunosuppressants, such as cyclosporin, tacrolimus, rapamycin and other FK-506 type immunosuppressants.

[0302] In one embodiment, the present invention may therefore provide a method of treating RAGE mediated diseases, the method comprising administering to a subject, an amount of a fusion protein of the present invention in combination with therapeutic agents selected from the group consisting of alkylating agents, antimetabolites, plant alkaloids, antibiotics, hormones, biologic response modifiers, analgesics, NSAIDs, DMARDs, biologic response modifiers (e.g., glucocorticoids), sulfonylureas, biguanides, insulin, cholinesterase inhibitors, antipsychotics, antidepressants, anticonvulsants, and immunosuppressants, such as cyclosporin, tacrolimus, rapamycin and other FK-506 type immunosuppressants. In a further embodiment, the present invention provides the pharmaceutical composition of the invention as described above, further comprising one or more therapeutic agents selected from the group consisting of alkylating agents, antimetabolites, plant alkaloids, antibiotics, hormones, biologic response modifiers, analgesics, NSAIDs, DMARDs, biologic response modifiers (e.g., glucocorticoids), sulfonylureas, biguanides, insulin, cholinesterase inhibitors, antipsychotics, antidepressants, anticonvulsants, and immunosuppressants, such as cyclosporin, tacrolimus, rapamycin and other FK-506 type immunosuppressants.

[0303] Where the present invention relates to a method of treating a RAGE mediated diseases comprising administering to a subject an amount of a RAGE fusion protein in combination with an additional therapeutic agent, the order of administration of the RAGE fusion protein and the additional active agent may be simultaneous, subsequent, or sequential administration.

### Lyophilized Formulations

[0304] In other embodiments, the present invention also provides formulations comprising a RAGE fusion protein. Embodiments of the formulations may comprise a solid mixture of a lyoprotectant, a RAGE fusion protein, and buffer. The solid may be prepared by lyophilization of an aqueous solution comprising a lyoprotectant, a RAGE fusion protein, and buffer.

[0305] The RAGE fusion protein formulation may comprise a stable therapeutic agent that is formulated for use in a clinic or as a prescription medicine. For example, in certain embodiments, the RAGE fusion protein formulation may exhibits less than 10%, or less than 5%, or less than 3% decomposition after one week at 40 degrees Centigrade.

[0306] Also, the RAGE fusion protein formulation may be stable upon reconstitution in a diluent. In certain embodiments, less than about 10%, or about 5%, or about 4%, or about 3%, or about 2%, or about 1% of the RAGE fusion protein is present as an aggregate in the RAGE fusion protein formulation.

[0307] Methods of administration of either nucleic acid based or protein based compositions of the invention, particularly RAGE fusion proteins or expression constructs as described herein, can be by any of a number of methods well known in the art. These methods include local or systemic administration and may be administered intracerebroventricularly, intrathecally, intradermally, intramuscularly, intraperitoneally, intravenously, intra-arterially, subcutaneously, rectally, orally, buccally, sublingually, intranasally, or as an aerosol. In addition, it may be desirable to introduce either nucleic acid based or protein based compositions of the invention into the central nervous system by any suitable route, including intraventricular, intrathecal, intracerebroventricular, and epidural administration via injection or via infusion using a pump. For example, intraventricular injection may be facilitated by an intraventricular catheter attached to a reservoir, such as an Ommaya reservoir. Infusion using a pump may be facilitated, for example, by an implantable pump attached to a catheter. In another embodiment, intracerebroventricular injection may be facilitated by an implantable pump attached to a catheter.

[0308] These and other implants and prosthetics can be treated with the subject fusion proteins or with an expression construct containing a nucleic acid expressing a subject fusion protein. In this way, the subject fusion proteins can be administered directly to the specific affected tissue.

[0309] Methods of introduction may also be provided by rechargeable or biodegradable devices. Furthermore, it is contemplated that administration may occur by coating a device, implant, stent, or prosthetic.

[0310] As described in more detail herein, RAGE has been implicated in the pathogenesis of a variety of disease states. Thus, the RAGE fusion protein formulations of the present invention may be used to treat a variety of RAGE-mediated disorders.

[0311] In certain embodiments, a RAGE fusion protein formulation of the present invention may be used to treat a symptom of diabetes or a symptom of diabetic late complications. For example, the symptom of diabetes or diabetic late complications comprises at least one of diabetic nephropathy, diabetic retinopathy, a diabetic foot ulcer, a cardiovascular complication, or diabetic neuropathy.

[0312] In other embodiments, a RAGE fusion protein formulation of the present invention may be used to treat at least one of amyloidosis, Alzheimer's disease, cancer, kidney failure, or inflammation associated with autoimmunity, inflammatory bowel disease, rheumatoid arthritis, psoriasis, multiple sclerosis, hypoxia, stroke, heart attack, hemorrhagic shock, sepsis, organ transplantation, or impaired wound healing.

[0313] Or, the RAGE fusion protein formulation may be used to treat osteoporosis. For example, in certain embodiments, administration of a RAGE fusion protein of the present invention increases bone density of subject or reduces the rate of a decrease in bone density of a subject.

[0314] In some embodiments, the autoimmunity treated using the RAGE fusion protein formulations of the present invention may comprise rejection of at least one of skin cells, pancreatic cells, nerve cells, muscle cells, endothelial cells, heart cells, liver cells, kidney cells, a heart, bone marrow cells, bone, blood cells, artery cells, vein cells, cartilage cells, thyroid, cells, or stem cells. Or, the RAGE fusion protein formulation may be used to treat kidney failure.

[0315] In certain embodiments, the RAGE fusion protein formulation may used to treat inflammation and/or rejection associated with transplantation of at least one of an organ, a tissue, or a plurality of cells from a first site to a second site. The first and second sites may either be in different subjects, or in the same subject. Transplantation of a variety of different cell types may be improved using the RAGE fusion protein formulations of the present invention. For example, the transplanted cells, tissue, or organ may comprise a cell, tissue or organ of a pancreas, skin, liver, kidney, heart, bone marrow, blood, bone, muscle, artery, vein, cartilage, thyroid, nervous system, or stem cells.

[0316] A variety of lyoprotectants may be used in the lyophilized RAGE fusion protein formulations of the present invention. In some embodiments, the lyoprotectant may comprise a non-reducing sugar. For example, the non-reducing sugar may comprise sucrose, mannitol, or trehalose. Also, a variety of buffers may be used in the lyophilized RAGE fusion protein formulation. In certain embodiments, the buffer may comprise histidine.

[0317] The solid lyophilized RAGE fusion protein formulation may comprise additional components. In certain embodiments, the RAGE fusion protein formulation may further comprise at least one of a surfactant, a chelating agent or a bulking agent.

[0318] In one embodiment, the present invention comprises a reconstituted formulation comprising a lyophylized RAGE fusion protein reconstituted in a diluent, wherein the RAGE fusion protein concentration in the reconstituted formulation is within the range from about 1 mg/mL to about 400 mg/mL. Or, other concentrations of the RAGE fusion protein may be used as described herein.

[0319] In other embodiments, the present invention may also comprise methods for preparing stable reconstituted formulation of a RAGE fusion protein. The reconstituted formulation may comprise a concentration that is suitable for direct use (e.g., direct administration to a subject) or that may be further diluted and/or mixed with a delivery agent.

[0320] In certain embodiments, the method may comprise reconstituting a lyophilized mixture of the RAGE fusion protein and a lyoprotectant in a diluent such that the RAGE fusion protein concentration in the reconstituted formulation is in a range from about 1 mg/mL to about 400 mg/mL. Or, other concentrations as described herein may be used as described herein.

[0321] A variety of lyoprotectants may be used in the reconstituted RAGE fusion protein formulations of the present invention. In some embodiments, the lyoprotectant may comprise a non-reducing sugar. For example, the non-reducing sugar may comprise sucrose, mannitol, or trehalose. Also, a variety of buffers may be used in the lyophilized RAGE fusion protein formulation. In certain embodiments, the buffer may comprise histidine.

[0322] The reconstituted RAGE fusion protein formulation may comprise additional components. In certain embodiments, the RAGE fusion protein formulation may further comprise at least one of a surfactant, a chelating agent or a bulking agent.

[0323] A variety of diluents suitable for pharmaceuticals may be used to reconstitute the lyophilized RAGE fusion protein. In an embodiment, the lyophilized RAGE fusion protein is sterile. Also in an embodiment, the diluent is sterile. In one embodiment, the diluent may comprise water for injection (WFI). Also, in certain embodiments, the amount of diluent added is based on the therapeutic dosage and the pharmacokinetic profile of the RAGE fusion protein, as well as the biocompatibility of the formulation and carrier being administered. In an embodiment, the reconstituted formulation is isotonic.

[0324] The reconstituted RAGE fusion protein formulation may be suitable for administration by various routes and as is required for treatment of the RAGE-mediated disorder of interest. In certain embodiments, the reconstituted RAGE fusion protein formulation is suitable for at least one of intravenous, intraperitoneal, subcutaneous, intraventricular, intrathecal, intracerebroventricular, or epidural administration of the formulation to a subject.

[0325] In yet other embodiments, the present invention may comprise articles of manufacture that include RAGE fusion proteins. For example, in certain embodiments, the article of manufacture may comprise a container which holds a lyophylized RAGE fusion protein, and instructions for reconstituting the lyophilized formulation with a diluent. In certain embodiments, the articles of manufacture may comprise a container which holds a formulation comprising a lyophilized mixture of a lyoprotectant, a RAGE fusion protein, and buffer. The article of manufacture may also comprise instructions for reconstituting the lyophilized formulation with a diluent.

[0326] A variety of lyoprotectants may be used in the articles of manufacture of the present invention. In some embodiments, the lyoprotectant may comprise a non-reducing sugar. For example, the non-reducing sugar may comprise sucrose, mannitol, or trehalose. Also, a variety of buffers may be used in the lyophilized RAGE fusion protein formulation. In certain embodiments, the buffer may comprise histidine.

[0327] The RAGE fusion protein formulation of the articles of manufacture of the present invention may comprise additional components. In certain embodiments, the lyophilized RAGE fusion protein formulation may further comprise at least one of a surfactant, a chelating agent or a bulking agent.

[0328] A variety of diluents suitable for pharmaceuticals may be provided for reconstituting the lyophilized RAGE fusion protein. In an embodiment, the lyophilized formulation is sterile. Alternatively or additionally, the diluent may be sterile. In one embodiment, the diluent may comprise water for injection (WFI). Thus, the article of manufacture may further comprise a second container which holds a diluent for reconstituting the lyophilized formulation, wherein the diluent is water for injection (WFI). In an embodiment, the reconstituted formulation is isotonic.

[0329] Also, in certain embodiments, the amount of diluent added is based on the therapeutic dosage and the pharmacokinetic profile of the RAGE fusion protein, as well as the biocompatibility of the formulation and carrier being administered. In alternate embodiment, the instructions are for reconstituting the lyophilized formulation so as to have the concentrations as described herein. For example, in certain embodiments, the instructions are for reconstituting the lyophilized formulation such that the RAGE fusion protein concentration in the reconstituted formulation is within the range from about 40 mg/mL to about 100 mg/mL.

[0330] Also, in certain embodiments, when reconstituted according to the instructions provided, the reconstituted RAGE fusion protein formulation may be suitable for administration by various routes and as is required for treatment of the RAGE-mediated disorder of interest. In certain embodiments, the reconstituted RAGE fusion protein formulation is suitable for at least one of intravenous, intraperitoneal, subcutaneous, intraventricular, intrathecal, intracerebroventricular, or epidural administration of the formulation to the subject.

[0331] In certain embodiments of the formulations, articles of manufacture, and methods of making formulations comprising a RAGE fusion protein, the RAGE fusion protein concentration in the reconstituted formulation may be at least 10 mg/mL, or at least 20 mg/mL, or at least 50 mg/mL. In alternate embodiments, the RAGE fusion protein concentration in the reconstituted formulation may be at least 100 mg/mL, or 200 mg/mL, or 400 mg/mL. For example, in alternate embodiments, the RAGE fusion protein concentration in the reconstituted formulation is at least about 0.5 to 400 mg/mL, or about 1 to 200 mg/mL, 40 to 400 mg/mL, 50 to 400 mg/mL, 40 to 100 mg/mL, 50 to 100 mg/mL, or about 40-50 mg/mL.

[0332] Any of the embodiments described herein may be used as the RAGE fusion protein in the formulations of the present invention. Thus, the embodiments of RAGE fusion proteins as described herein may be used for each of the lyophilized formulations, reconstituted lyophilized formulations, or the methods of making the lyophilized formulations or reconstituted lyophilized formulations, or the articles of manufacture comprising either the lyophilized formulations or the reconstituted lyophilized formulations of the present invention.

### Preparation of Lyophilized Formulations

[0333] In another embodiment, the present invention provides a pre-lyophilized formulation, a lyophilized formulation, a reconstituted formulation, and methods for preparation thereof.

[0334] After preparation of a RAGE fusion protein of interest as described above, a “pre-lyophilized formulation” may be produced. The amount of RAGE fusion protein present in the pre-lyophilized formulation may be determined taking into account the desired dose volumes, mode(s) of administration etc. In an embodiment, the amount of fusion protein in the pre-lyophilized formulation may be greater than 1 mg/mL. Also in certain embodiments, the amount of fusion protein in the pre-lyophilized formulation may be less than about 5 mg/mL, 10 mg/mL, 50 mg/mL, 100 mg/mL, or 200 mg/mL.

[0335] In a further embodiment, the pre-lyophilized formulation may be a pH-buffered solution at a pH from about 4-8. In another embodiment, the pre-lyophilized formulation may be a pH-buffered solution at a pH from about 5-7. Exemplary buffers include histidine, phosphate, Tris, citrate, succinate and other organic acids as described herein. The buffer concentration may be from about 1 mM to about 100 mM, or less than about 50 mM, or from about 2 mM to about 50 mM, or less than about 15 mM, or from about 3 mM to about 15 mM depending, for example, on the buffer and the desired isotonicity of the formulation (e.g. of the reconstituted formulation). In an embodiment, the buffer is histidine.

[0336] The lyoprotectant may be added to the pre-lyophilized formulation. In an embodiment, the lyoprotectant comprises a sugar. In another embodiment, the lyoprotectant comprises a non-reducing sugar. In another embodiment, the lyoprotectant comprises the non-reducing sugar sucrose. Or, the non-reducing sugar may comprise mannitol. Or, the non-reducing sugar may comprise trehalose. The amount of lyoprotectant in the pre-lyophilized formulation is generally such that upon reconstitution, the resulting formulation will be isotonic. However, a hypertonic reconstituted formulation may also be suitable, for example in formulations for peripheral parenteral administration. In addition, the amount of lyoprotectant should not be so low such that an unacceptable amount of degradation and/or aggregation of the protein occurs upon lyophilization. In alternate embodiments, an unacceptable amount of aggregation may be where 20%, or 10%, or 5% or more of the RAGE fusion protein is present as an aggregate in a formulation. An exemplary range of lyoprotectant concentration in the pre-lyophilized formulation may be less than about 400 mM. In another embodiment, the range of lyoprotectant concentration in the pre-lyophilized formulation is less than about 100 mM. In alternate embodiments, the range of lyoprotectant concentration in the pre-lyophilized formulation may therefore range from about 0.5 mM to 400 mM, or from about 2 mM to 200 mM, or from about 30 mM to about 150 mM, or from about 60-65 mM. Or, ranges within these ranges may be used. Also, in some embodiments, the lyoprotectant is added in an amount to render the reconstituted formulation isotonic.

[0337] The ratio of RAGE fusion protein to lyoprotectant in the pre-lyophilized formulation is selected for each RAGE fusion protein and lyoprotectant combination. In an embodiment of an isotonic reconstituted formulation with a high RAGE fusion protein concentration (e.g., greater than or equal to about 50 mg/mL), the molar ratio of lyoprotectant to RAGE fusion protein may be from about 50 to about 1500 moles lyoprotectant to 1 mole RAGE fusion protein. In another embodiment, the molar ratio of lyoprotectant to RAGE fusion protein may be from about 150 to about 1000 moles of lyoprotectant to 1 mole fusion protein. In another embodiment, the molar ratio of lyoprotectant to RAGE fusion protein may be from about 150 to about 300 moles of lyoprotectant to 1 mole RAGE fusion protein. Or, ranges within these ranges may be used. For example, these ranges may be suitable where the lyoprotectant is a non-reducing sugar, such as sucrose, trehalose or mannitol.

[0338] In another embodiment of the invention, a surfactant may be added to the pre-lyophilized formulation. Alternatively, or in addition, the surfactant may be added to the lyophilized formulation and/or the reconstituted formulation. Exemplary surfactants include nonionic surfactants such as polysorbates (e.g. polysorbates 20 or 80) (Tween 20™ or Tween 80™); poloxamers (e.g. poloxamer 188). The amount of surfactant added is such that it reduces aggregation of the reconstituted protein and minimizes the formation of particulates after reconstitution. For example, the surfactant may be present in the pre-lyophilized formulation in an amount from about 0.001% to 0.5%. For example, in an embodiment where the surfactant comprises polysorbate 80, the surfactant may be present in the pre-lyophilized formulation in an amount from about 0.005% to 0.05%, or about 0.008% to 0.012%, or at about 0.01%. Alternatively, the surfactant may be present in the formulation so as to comprise a final concentration ranging from 0.001 mg/mL to about 100 mg/mL, or about 0.01 mg/mL to about 10 mg/mL. Or, ranges within these ranges may be used.

[0339] In certain embodiments of the invention, a mixture of the lyoprotectant (such as sucrose or histidine) and a bulking agent (e.g. mannitol or glycine) may be used in the preparation of the pre-lyophilization formulation. The bulking agent may allow for the production of a uniform lyophilized cake without excessive pockets therein etc.

[0340] Other pharmaceutically acceptable carriers, excipients or stabilizers such as those described in Remington's Pharmaceutical Sciences 16th edition, Osol, A. Ed. (1980) may be included in the pre-lyophilized formulation (and/or the lyophilized formulation and/or the reconstituted formulation) provided that they do not adversely affect the desired characteristics of the formulation. Acceptable carriers, excipients or stabilizers are nontoxic to recipients at the dosages and concentrations employed and include additional buffering agents; preservatives; co-solvents; antioxidants including ascorbic acid and methionine; chelating agents such as EDTA; metal complexes (e.g. Zn-protein complexes); biodegradable polymers such as polyesters; and/or salt-forming counter ions such as sodium.

[0341] The RAGE fusion protein formulations of the present invention may also contain additional proteins as necessary for the particular indication being treated. The additional proteins may be selected such that the proteins each have complementary activities that do not adversely affect each other or the RAGE fusion protein. Such proteins are suitably present in combination in amounts that are effective for the purpose intended.

[0342] The RAGE fusion protein formulations of the present invention may be sterile for in vivo administration. This may be accomplished by filtration through sterile filtration membranes, prior to, or following, lyophilization and reconstitution.

[0343] After the RAGE fusion protein, lyoprotectant and other optional components are mixed together, the formulation may be lyophilized. Many different freeze-dryers are available for this purpose such as Hull50™ (Hull, USA) or GT20™ (Leybold-Heraeus, Germany) freeze-dryers. Freeze-drying is accomplished by freezing the formulation and subsequently subliming ice from the frozen content at a temperature suitable for primary drying. Under this condition, the product temperature is below the eutectic point or the collapse temperature of the formulation. Typically, the shelf temperature for the primary drying will range from about −50 to 25° C. (provided the product remains frozen during primary drying) at a suitable pressure, ranging typically from about 50 to 250 mTorr. In an embodiment, the pressure is about 100 mTorr and the sample may be lyophilized between about −30 and 25° C. The formulation, size and type of the container holding the sample (e.g., glass vial) and the volume of liquid may dictate the time required for drying, which can range from a few hours to several days (e.g., 40-60 hrs). Freeze-drying conditions can be varied depending on the formulation and vial size.

[0344] In some instances, it may be desirable to lyophilize the protein formulation in the container in which reconstitution of the protein is to be carried out in order to avoid a transfer step. The container in this instance may, for example, be a 2, 3, 5, 10, 20, 50, 100, or 250 cc vial. In an embodiment, the container is any container suitable to prepare a reconstituted formulation having a volume of less than or equal to 100 mL.

[0345] As a general proposition, lyophilization will result in a lyophilized formulation in which the moisture content thereof is less than about 5%. In an embodiment, the moisture content of the lyophilized formulation is less than about 3%. In another embodiment, the moisture content of the lyophilized formulation is less than about 1%.

[0346] Reconstitution of the Lyophilized Formulation

[0347] At the desired stage, typically when it is time to administer the RAGE fusion protein to a patient or subject, the lyophilized formulation may be reconstituted with a diluent such that the RAGE fusion protein concentration in the reconstituted formulation is about greater than 10 mg/mL, or greater than 20 mg/ml, or greater than 50 mg/mL, or about 30-50 mg/mL, or about 50 mg/mL. In alternate embodiments, the RAGE fusion protein concentration in the reconstituted formulation may be at least 100 mg/mL, or 200 mg/mL, or 400 mg/mL. For example, in alternate embodiments, the RAGE fusion protein concentration in the reconstituted formulation may be in the range of from about 1 mg/mL to about 600 mg/mL, or from about 1 mg/mL to about 500 mg/mL, or from about 1 mg/mL to about 400 mg/mL, or from about 1 mg/mL to about 200 mg/mL, or from about 10 mg/mL to about 400 mg/mL, or from about 10 mg/mL to about 200 mg/mL, or from about 40 mg/mL to about 400 mg/mL, or from about 40 mg/mL to about 200 mg/mL, or from about 50 mg/mL to about 400 mg/mL, or from about 50 mg/mL to about 200 mg/mL. In other embodiments, the RAGE fusion protein concentration in the reconstituted formulation is from about 40 mg/mL to about 100 mg/mL, or about 50 mg/mL to about 100 mg/mL, or about 40 mg/mL to about 50 mg/mL. Such RAGE fusion protein concentrations in the reconstituted formulation are considered to be particularly useful where subcutaneous delivery of the reconstituted formulation is intended. However, for other routes of administration, such as intravenous administration, lower concentrations of the protein in the reconstituted formulation may be desired (for example from about 5-50 mg/mL, or from about 10-40 mg/mL RAGE fusion protein in the reconstituted formulation). Thus, in some embodiments, the concentration of fusion protein in the reconstituted formulation may the same or less than 2 times the concentration of the fusion protein in the pre-lyophilized formulation.

[0348] In certain embodiments, the fusion protein concentration in the reconstituted formulation is significantly higher than that in the pre-lyophilized formulation. For example, the fusion protein concentration in the reconstituted formulation may, in certain embodiments, be about 2-40, or 2-10, or 3-8 times that of the pre-lyophilized formulation. In an embodiment, the RAGE fusion protein concentration in the reconstituted formulation may be about 3-6 times that of the pre-lyophilized formulation. In another embodiment where the concentration of RAGE fusion protein in the pre-lyophilized formulation is about 15 mg/mL, the concentration of the RAGE fusion protein in the reconstituted formulation is greater than or equal to about 50 mg/mL (e.g., at least three fold or at least four fold greater).

[0349] The delivery of a high protein concentration is often advantageous or required for subcutaneous administration due to the volume limitations (less than or equal to 1.5 mL) and dosing requirements (greater than or equal to 100 mg). However, protein concentrations (greater than or equal to 50 mg/mL) may be difficult to achieve in the manufacturing process since at high concentrations, a protein may have a tendency to aggregate during processing and become difficult to manipulate (e.g. pump) and sterile filter. Alternatively, the lyophilization process may provide a method to allow concentration of a protein. For example, a RAGE fusion protein may be filled into vials at a volume (Vf) and then lyophilized. The lyophilized RAGE fusion protein is then reconstituted with a smaller volume (Vr) of water or preservative (e.g. BWFI) than the original volume (e.g. Vr=0.25 Vf) resulting in a higher RAGE fusion protein concentration in the reconstituted solution. This process also results in the concentration of the buffers and excipients. For subcutaneous administration, the solution is desirably isotonic.

[0350] Reconstitution generally takes place at a temperature of about 25° C. to ensure complete hydration, although other temperatures may be employed as desired. The time required for reconstitution may depend, e.g., on the type of diluent, amount of excipient(s) and protein. Exemplary diluents include sterile water, bacteriostatic water for injection (BWFI), a pH buffered solution (e.g. phosphate-buffered saline), sterile saline solution, Ringer's solution or dextrose solution. In an embodiment, the diluent provides a reconstituted formulation suitable for injection. In another embodiment, where the diluent provides a reconstituted formulation suitable for injection, the diluent comprises water for injection (WFI). The diluent optionally contains a preservative. The amount of preservative employed may be determined by assessing different preservative concentrations for compatibility with the protein and preservative efficacy testing.

[0351] Administration of the Reconstituted Formulation

[0352] The reconstituted formulation may be administered to a mammal, such as a human, in accord with known methods, such as intravenous administration as a bolus or by continuous infusion over a period of time, by intramuscular, intraperitoneal, intracerobrospinal, subcutaneous, intra-articular, intrasynovial, intrathecal, intraventricular, intracerebroventricular, epidural, oral, topical, inhalation routes.

[0353] In embodiments, the reconstituted formulation may be administered to the mammal by subcutaneous (i.e. beneath the skin) administration. For such purposes, the reconstituted formulation may be injected using a syringe. However, other devices for administration of the reconstituted formulation are available such as injection devices (e.g. the Inject-ease™ and Genject™ devices); injector pens (such as the GenPen™); needleless devices (e.g. MediJector™ and BioJector™); and subcutaneous patch delivery systems.

[0354] The appropriate dosage or therapeutically effective amount of the RAGE fusion protein will depend, for example, on the condition to be treated, the severity and course of the condition, whether the RAGE fusion protein is administered for preventive or therapeutic purposes, previous therapy, the patient's clinical history and response to the RAGE fusion protein, and the discretion of the attending physician. The RAGE fusion protein may be administered to the subject at one time or over a series of treatments. The RAGE fusion protein may be administered as the sole treatment or in conjunction with other drugs or therapies, by way of simultaneous, sequential, or subsequent administrations. In an embodiment, a dosage from about 0.1-20 mg/kg is an initial candidate dosage for administration to the subject, whether, for example, by one or more separate administrations. As described above, other dosage regimens may be useful.

[0355] Articles of Manufacture

[0356] In another embodiment of the invention, an article of manufacture is provided which contains the formulation of the present invention and may provide instructions for its reconstitution and/or use. The article of manufacture may comprise a container. Suitable containers include, for example, bottles, vials (e.g. dual chamber vials), syringes (such as dual chamber syringes) and test tubes. The container may be formed from a variety of materials such as glass or plastic. The container may hold a lyophilized formulation. In certain embodiments, there may be a label affixed to, or associated with, the container. The label may indicate instructions for reconstitution and/or use. For example, in certain embodiments, the label may indicate that the lyophilized formulation is reconstituted to protein concentrations as described above. The label may further indicate that the formulation is useful or intended for subcutaneous administration.

[0357] The container holding the formulation may allow for repeat administrations (e.g., from 2-6, or 2-10, or 2-50 administrations) of the formulation. The article of manufacture may further include other materials desirable from a commercial and user standpoint, including other buffers, diluents, filters, needles, syringes, and package inserts with instructions for use.

### EXAMPLES

[0358] Features and advantages of the inventive concept covered by the present invention are further illustrated in the examples which follow.

### Example 1A

### Production of RAGE Fusion Proteins

[0359] Two plasmids were constructed to express RAGE-IgG fusion proteins. Both plasmids were constructed by ligating different lengths of a 5′ cDNA sequence from human RAGE with the same 3′ cDNA sequence from human IgG Fc (γ1). These expression sequences (i.e., ligation products) were then inserted in pcDNA3.1 expression vector (Invitrogen, CA). The nucleic acid sequences that encode two wild type RAGE fusion proteins are shown in FIGS. 2 and 3. For TTP-4000 RAGE fusion protein, the nucleic acid sequence from 1 to 753 (highlighted in bold) encodes the RAGE N-terminal protein sequence, whereas the nucleic acid sequence from 754 to 1386 encodes the IgG protein sequence (FIG. 2). For TTP-3000, the nucleic acid sequence from 1 to 408 (highlighted in bold) encodes the RAGE N-terminal protein sequence, whereas the nucleic acid sequence from 409 to 1041 encodes the IgG protein sequence (FIG. 3).

[0360] To produce the RAGE fusion proteins, the expression vectors comprising the nucleic acid sequences of either SEQ ID NO: 30 or SEQ ID NO: 31 were stably transfected into CHO cells. Positive transformants were selected for neomycin resistance conferred by the plasmid and cloned. High producing clones as detected by Western Blot analysis of supernatant were expanded and the gene product was purified by affinity chromatography using Protein A columns. Expression may be optimized so that cells may produce recombinant TTP-4000 at levels of about 1.3 grams per liter.

### Example 1B

### Alternate Production of Four Domain RAGE Fusion Proteins

[0361] A plasmid was constructed to express RAGE-IgG fusion proteins. The plasmid was constructed by ligating a 5′ cDNA sequence from human RAGE with a 3′ cDNA sequence from human IgG Fc(γ1). PCR was used to amplify the cDNA. Further, on the 5′ end, the PCR primer added an Eco RI restriction enzyme site from cloning and a Kozak consensus translation initiation sequence. On the 3′ end, the PCR primer added a Xho I restriction just past the terminal codon. On the 3′ end, the PCR primer also included two silent base changes that remove a cryptic RNA splice site in the immunoglobulin portion near the terminal codon. The codon encoding for proline (residue 459 based on numbering in the protein sequence in SEQ ID NO: 32) was changed from CCG to CCC, and the codon encoding for glycine (residue 460 based on numbering in the protein sequence in SEQ ID NO: 32) was changed from GGT to GGG. The PCR fragment was digested with Eco RI and Xho I and then inserted into a retrovector plasmid (pCNS-newMCS-WPRE (new ori), available from Gala, Inc.) that had been digested with Mfe I (to form a compatible end with Eco RI) and digested with Xho I. The inserted portion of the cloned plasmid and cloning junctions were sequenced to ensure that no mutations occurred during cloning.

[0362] To produce the RAGE-IgG fusion protein, the expression vector comprising the nucleic acid sequence SEQ ID NO: 54 was stably transfected in CHO cells.

[0363] The sequence of the RAGE fusion protein TTP-4000 expressed by the transfected cells was confirmed by various characterization studies as either SEQ ID NO: 34 or SEQ ID NO: 56, or both SEQ ID NO: 34 and SEQ ID NO: 56. Thus, the signal sequence encoded by the first 23 amino acids of SEQ ID NO: 32 was cleaved and the N-terminal residue was glutamine (Q) or pyroglutamic acid (pE) or a mixture thereof. Characterization studies also showed glycosylation sites at N2 and N288 (based on numbering of SEQ ID NO: 34 or SEQ ID NO: 56) and showed that the C_{H}3 region of the RAGE fusion protein may have its C-terminal residue cleaved off through a post-translational modification when expressed in this recombinant system.

### Example 1C

### Alternate Production of Three Domain RAGE Fusion Proteins

[0364] A plasmid can be constructed to express three domain RAGE-IgG fusion proteins (e.g., one RAGE domain and two IgG domains) such as TTP-3000 in the manner described above for TTP-4000. The plasmid is constructed by ligating a 5′ cDNA sequence from human RAGE encoding amino acids 1-136 of human RAGE with a 3′ cDNA sequence from human IgG Fc(γ1). PCR can be used to amplify the cDNA. On the 5′ end, a PCR primer may add a restriction site (e.g., an Eco RI restriction enzyme site as used for TTP-4000) for cloning and a Kozak consensus translation initiation sequence. On the 3′ end, the PCR primer may also add a restriction site (e.g., a Xho I restriction site) just past the terminal codon. The PCR primers may also include silent base changes as may be needed to remove any cryptic RNA splice sites, such as the cryptic RNA splice sites located at the 3′ end of the immunoglobulin C_{H}2 domain as describes in Example 1B. To remove these cryptic splice sites, the codon encoding for proline 344 of SEQ ID NO: 35 (i.e., residues 1030-1032 based on numbering in the DNA sequence in SEQ ID NO: 31) may be changed from CCG to CCC, and the codon encoding for glycine 345 of SEQ ID NO: 35 (residues 1033-1035 based on numbering in the DNA sequence in SEQ ID NO: 31) may be changed from GGT to GGG. The PCR fragment may then be digested with the appropriate restriction enzymes (e.g., Eco RI and Xho I), and inserted into the retrovector plasmid pCNS-newMCS-WPRE (new ori; available from Gala, Inc.). The vector may be digested with Mfe I to form a compatible end with Eco RI, and also digested with Xho I. The inserted portion of the cloned plasmid and cloning junctions can be sequenced to ensure that no mutations occurred during cloning.

[0365] To produce the RAGE-IgG fusion protein, the expression vector comprising the nucleic acid sequence SEQ ID NO: 55 (i.e., comprising the change in DNA sequence to remove cryptic splice sites) can be stably transfected in CHO cells as described in Example 1A and 1B.

[0366] The sequence of the RAGE fusion protein TTP-3000 expressed by the transfected cells may be either SEQ ID NO: 36, SEQ ID NO: 37 or SEQ ID NO: 57, or a combination of SEQ ID NO: 36, SEQ ID NO: 37 and/or SEQ ID NO: 57. Thus, the signal sequence encoded by the first 22 and/or 23 amino acids of SEQ ID NO: 35 may be cleaved and the N-terminal residue may be glutamine (Q) or pyroglutamic acid (pE) or a mixture thereof. Glycosylation may occur at sites at N2 and N174 (based on numbering of SEQ ID NO: 37 or SEQ ID NO: 57) and/or other glycosylation sites that may be present. The C_{H}3 region of the RAGE fusion protein may have its C-terminal residue cleaved off through a post-translational modification when expressed in this recombinant system.

### Example 2

### Generation of RAGE Fusion Protein Mutants

[0367] Wild type TTP-4000 RAGE plasmid DNA can be used as template for the site-directed mutagenesis and preparation of forward and reverse primers using the following strategies.

[0368] To insert a mutation at residue 288, a forward primer containing a mutation site relative the wild type TTP-4000 RAGE plasmid and be 32-34 nucleotides in length can be used. Generally, the primer includes about 10 nucleotides downstream of the mutation site. For example, a forward primer sequence encoding a N288Q mutation is 5′-GCCTCGGGAGGAACAGTAcAgTCCACCTACC (SEQ ID NO: 196), where the bold lowercase letters represent the mutated nucleotides relative to wild type TTP-4000 RAGE plasmid. Using this primer in combination with a reverse primer to amplify the fusion protein DNA by PCR, the amino acid encoded may be changed from wild type asparagine (aAc) to glutamine (cAg). A reverse primer containing an overlapping region with the forward primer at 5′ end of 15-20 nucleotides is used. Thus, a reverse primer sequence may be 5′-TACTGTTCCTCCCGAGGCTTGGTCTTGG (SEQ ID NO: 197) where the underlined letters are an region that overlaps with forward primer of SEQ ID NO: 196.

[0369] To insert a mutation R198A at residue 198, the forward primer having the sequence 5′-GCCTCGGCACCGGGCCCTGgcGACCGCCCCTAT (SEQ ID NO: 198) and the reverse primer having the sequence 5′-CAGGGCCCGGTGCCGAGGCAGGCCAGGGGA (SEQ ID NO: 199) is used. Using these primers to amplify the intervening DNA results in changing the wild type arginine (cgG) to alanine (gcG).

[0370] The mutants may be generated by PCR using the mutant forward and reverse primer pair with either methylated wild type or mutant plasmid DNA as template using standard amplification conditions based upon the expected primer annealing temperature. PCR products may be transformed into DH5α-Ti chemically competent cells, spread on pre-warmed, LB agar plates with 100 μg/ml ampicillin, incubated at 37° C. overnight. The colonies are then analyzed by colony PCR to confirm the transformants contain an insert having the expected size. The sequence of the mutant DNA sequence was confirmed by DNA sequencing.

[0371] Using analogous techniques, each of the SEQ ID NOS: 202 to 220 may be prepared.

### Example 3

### Transfection of HEK and CHO Cells with Clones Expressing Mutant RAGE Fusion Proteins

[0372] HEK 293F cells or CHO cells are transfected with the purified plasmid DNA of the TTP-4000 wild type or mutants using Fegene 6 (Roche) in 6-well plate essentially as instructed by the manufacturer. After a 24 hour transfection period, the cells are transferred to 150-mm dishes, and grown in culture medium with 1 mg/mL G418 for selection. After 15-20 days, antibiotic-resistant individual colonies are isolated using 3 mm cloning discs with 0.25% trypsin-EDTA. The collected cells are expanded in 24-well plates and cultured at 37° C., 5% CO₂ humidified incubator using DMEM-10% FBS, 1 mg/mL G418.

[0373] The supernatant of each individual clone can be tested for expression of the RAGE fusion protein expression by indirect ELISA using anti-RAGE mAb and anti-human IgG Fc antibodies. Also, the expressed RAGE fusion protein may also be assayed for receptor-ligand binding activity by indirect ELISA using S100b and anti-human IgG Fc-AP antibody. For example, to assay for the RAGE fusion protein, the wells of 96-well ELISA plate are coated with either an anti-RAGE mAb, anti-human IgG Fc polyclonal antibody, or S100b. The plate is then blocked with 1% BSA-TBS, the culture supernatant added, and then alkaline phosphatase-conjugated goat anti-human IgG Fc added to detect binding of the RAGE fusion protein (i.e., the RAGE fusion protein can bind to either the RAGE ligand, the anti-RAGE mAb, or the anti-human IgG antibody that is coated onto the plate). Each incubation is followed by four-time washing of the plates with TBS containing 0.05% Tween 20. The pNPP substrate is added and the absorbance value at 405 nm detected with microplate reader.

[0374] The positive clones are further purified by limit dilution and final clones of different RAGE fusion protein mutants can then be used for the protein expression.

### Example 4

### Expression and Purification of TTP-4000

[0375] Stable cells of expressing TTP-4000 wild type RAGE fusion protein or a variant (i.e., mutant) thereof are grown at 37° C., 5% CO₂ humidified incubator using DMEM-10% FBS, 0.5 mg/mL G418 in T225 flasks for a week and then transferred to 5 L wave bioreactor or roller bottles. The supernatant is tested for S100b binding activity and the level of expressed protein by indirect ELISA weekly.

[0376] After 10-25 days culture, the media is collected and centrifuged at 10,000×g at 4° C. for 30 min. The supernatant is then sequentially filtered with a 0.4 μm filter followed by a 0.2 μm filter. A 1/20 volume of 1M Tris-HCl (pH 8.0) is added to the filtered media (i.e., supernatant) and loaded on protein A column. The column is washed with ˜20 volume of PBS containing 1M of NaCl until OD 280 nm <0.05 on UV detector. The protein is then eluted with 25 mM acetate, pH 3.5 and collected with fraction collector. The eluate is adjusted to pH 6.5 with 1.5M Tris-base solution and concentrated with Amicon ultra-centrifugal filter devices and dialyzed with phosphate buffered saline (PBS) overnight at 4° C.

[0377] The purified protein is tested for S100b binding activity by indirect ELISA. Protein concentration was determined both by ELISA and UV absorbance at 280 nm. The sample of purified protein was also be analyzed for purity, molecular weight, and protein concentration by electrophoresis using SDS-PAGE and microfluidic chip-based automated electrophoresis system.

### Example 5

### Pharmacokinetics of RAGE Fusion Proteins in Mice

[0378] This experiment examined the pharmacokinetics and in vitro stability of RAGE fusion proteins of the invention in CD-1 mice after IV administration of RAGE fusion proteins at 10 mg/kg. The concentration of RAGE fusion proteins (e.g., TTP4000 and variants thereof as delineated below) in mouse plasma was determined using an enzyme linked immunosorbant assay (ELISA) designed to measure fusion protein by detection of the RAGE and the immunoglobulin portions of the fusion protein. In this assay, the 96 well microtiter plates were coated with 100 μL/well of a RAGE monoclonal antibody (R & D Systems, #MAB1145) at 1 μg/mL in carbonate buffer, pH 9.6. After an overnight incubation at 4° C., the plates were washed with wash buffer (0.05% Tween-20, phosphate buffered saline (PBS)) and treated with a blocking buffer (3% bovine serum albumin (BSA), 0.05% Tween-20, PBS) for about 2 hours at room temperature. The assay plates were then washed with 0.05% Tween-20, PBS wash buffer and 100 μL/well of either: (1) TTP4000 plasma calibration standards (i.e., samples fortified with known concentrations of TTP4000 and then serially diluted); (2) quality controls (i.e., samples fortified with known concentrations of TTP4000 that define the quantitative range of the assay and serve to monitor assay performance); and (3) mouse plasma samples diluted in sample diluent (i.e., 3% BSA, 0.05% Tween-20, PBS) were loaded onto the plates. The plates were then incubated for 1 hour at room temperature on a plate shaker. The plates were then washed with 0.05% Tween-20, PBS and 100 μL/well of the detection antibody (biotinylated mouse anti-human IgG, Fc specific from Jackson Immuno Research, diluted 1:1000) was added followed by a 1 hour incubation at room temperature with shaking. The plates were washed again with 0.05% Tween-20, PBS wash buffer and 100 μL/well of a freshly prepared dilution (1:100,000) of streptavidin/HRP was added and the plates were incubated for 30 minutes with shaking at room temperature. Following the 30 minute incubation, the plates were washed and 100 μL/well of a 3,3′,5′5′-Tetramethlybenzidine (TMB) substrate was added and allowed to incubate at room temperature for about 10 minutes without shaking. The reaction was stopped by the addition of 100 μL/well of 2M H₂SO₄. Absorbance was determined using a Molecular Devices spectrophotometer (Lm1-Lm2: Lm1=450 nm, Lm2=650 nm). Plasma concentrations for the various RAGE fusion proteins were determined using SoftMax Pro software, 4 parameter fit.
[0379] RAGE fusion proteins used in this experiment were as follows
[0380] Batch 1—SEQ ID NO: 56 from CHO cells (wild type);
[0381] Batch 2—SEQ ID NO: 56 from HEK cells (wild type);
[0382] Batch 3—SEQ ID NO: 67 from HEK cells (R198A mutation relative to wild type);
[0383] Batch 4—SEQ ID NO: 71 from HEK cells (R198A and N2Q mutation relative to wild type);
[0384] Batch 5—SEQ ID NO: 72 from HEK cells (R198A and N58Q mutation relative to wild type)

[0385] As shown in FIG. 9, RAGE fusion proteins of Batch 3 (R198A) and Batch 4 (R198A and N2Q) remained at higher plasma concentrations over time as compared to other tested RAGE fusion proteins (FIG. 9A and FIG. 9B). This effect was observed over time periods from 0-336 hours (FIG. 9A) and 0-48 hours (FIG. 9B).

[0386] FIG. 10 shows mean pharmacokinetic parameters for the tested RAGE fusion proteins of Batches 1-5 following intravenous administration to mice at 10 mg/kg. Overall drug exposure as assessed by area under the curve (AUC) was greater in the RAGE fusion proteins of Batch 4 (R198A and N2Q) and Batch 5 (R198A and N58Q) than for Batches 1 and 2 (wild type) and Batch 3 (R198A). The total body clearance (Clp) for the RAGE fusion proteins of Batch 4 (R198A and N2Q) and Batch 5 (R198A and N58Q) were lower than for Batches 1 and 2 (wild type) and Batch 3 (R198A). The steady state volume of distribution (Vss) for the RAGE fusion proteins of Batch 4 (R198A and N2Q) and Batch 5 (R198A and N58Q) were lower than for Batches 1 and 2 (wild type) and Batch 3 (R198A).

[0387] FIG. 11 shows in vitro stability data for the tested RAGE fusion proteins of Batches 1 to 5 described above. FIG. 11A provides this data in tabular form, while FIG. 11B provides this data in graphic form. Fresh mouse plasma (drug concentration at 1.0 μg/mL) was incubated at 37° C., and samples were obtained from 0-48 hours.

### Example 6

### Measurement of Ligand Binding of Mutant RAGE Fusion Proteins

[0388] The supernatant from individual clones was used to measure expression of mutant TTP-4000 proteins and the ability of the expressed proteins to bind to the RAGE ligand S100b.

[0389] The binding assay was an indirect ELISA using S100b as the RAGE ligand, and an anti-human IgG Fc antibody labeled with alkaline phosphatase (AP) to detect RAGE binding to the S100b. The wells of 96-well ELISA plate were coated with 100 ul/well, 5 ug/ml of S100b overnight at 4° C. using 100 nM of bicarbonate/carbonate coating buffer (pH 9.6). The plate was then blocked with 300 ul/well of 1% BSA-TBST at room temperature for 2 hrs. Next, 100 ul/well of culture supernatant or purified mutant RAGE fusion protein was added, and then 100 ul/well of alkaline phosphatase-conjugated goat anti-human IgG Fc, 1:2500 dilution with 1% BSA-TBST was added. Each incubation was followed by four separate washes with TBS containing 0.05% Tween 20 (TBST). The alkaline phosphatase substrate, para-nitrophenyl phosphate (pNPP), was added and the absorbance value at 405 nm was detected with microplate reader and normalized to weight percent (wt %). Results are shown in FIG. 12.

[0390] All publications and patent applications are herein incorporated by reference to the same extent as if each individual publication or patent application was specifically and individually indicated to be incorporated by reference.

[0391] Although the foregoing invention has been described in some detail by way of illustration and example for purposes of clarity of understanding, it will be obvious that certain changes and modifications may be practiced within the scope of the appended embodiments.

1-29. (canceled)

30. A fusion protein comprising a Receptor for Advanced Glycation Endproducts (RAGE) polypeptide linked to an immunoglobulin polypeptide, wherein the RAGE polypeptide comprises a fragment of a mammalian RAGE having a ligand binding domain, and wherein the RAGE fusion protein comprises at least one mutation relative to the wild-type sequence in at least one of the RAGE polypeptide or the immunoglobulin polypeptide, wherein the mutation removes and/or alters at least one of a glycosylation site or an enzyme cleavage site.

31. The fusion protein of claim 30, wherein the RAGE polypeptide is a human RAGE polypeptide.

32. The fusion protein of claim 30, wherein the mutation changes the sequence in the wild-type RAGE polypeptide present at a glycosylation site.

33. The fusion protein of claim 30, wherein the glycosylation site has the amino acid sequence NXS or NXT, where X is any amino acid.

34. The fusion protein of claim 30, wherein the mutation changes the sequence in the wild-type RAGE polypeptide from at least one of NIT to QIT, or NGS to QGS, or NGS to NSS, or NST to QST to remove at least one glycosylation site.

35. The fusion protein of claim 30, wherein the glycosylation site is within the ligand binding site or the ligand binding domain of the RAGE polypeptide.

36. The fusion protein of claim 30, wherein the enzyme cleavage site is a furin cleavage site, such that the mutation changes the sequence in the wild-type RAGE polypeptide present at a recognition site for furin cleavage of the RAGE polypeptide.

37. The fusion protein of claim 30, wherein the mutation changes the amino acid sequence in the wild-type RAGE polypeptide from one of: (i) PRHRALR (SEQ ID NO:226) to PHRAALR (SEQ ID NO:227); (ii) PRHRALR to PRHKALR (SEQ ID NO:228); (iii) PRHRALR to PRHRALA (SEQ ID NO:229); (iv) PRHRALR to PRHRALK (SEQ ID NO:230); (v) PRHRALR to PRHRALH (SEQ ID NO:231); or (vi) PRHRALR to PRHRALT (SEQ ID NO:232) to remove a furin cleavage site.

38. The fusion protein of claim 30, wherein the RAGE polypeptide does not include an N-terminal leader peptide consisting of amino acids 1-23 of the wild-type RAGE polypeptide.

39. The fusion protein of claim 30, wherein at least one mutation comprises at least one of following: (i) N2Q; (ii) N58Q; (iii) G59S; (iv) N2Q and N58Q; or (v) N2Q and G59S of a human RAGE polypeptide that does not include an N-terminal leader peptide consisting of amino acids 1-23 of the wild-type RAGE polypeptide.

40. The fusion protein of claim 39, wherein the human RAGE polypeptide that does not include an N-terminal leader peptide consisting of amino acids 1-23 of the wild-type RAGE polypeptide comprises the sequence as set forth in at least one of: (i) SEQ ID NO: 8, SEQ ID NO: 16, or SEQ ID NO: 20; or (ii) SEQ ID NO: 8, SEQ ID NO: 16, or SEQ ID NO: 20 having the N-terminal glutamine cyclized to form pyroglutamic acid.

41. The fusion protein of claim 30, wherein the mutation to remove the furin cleavage site comprises at least one of R195A, R195K, R195T, R195H, R198A, R198K, R198H, R198T of a human RAGE polypeptide that does not include an N-terminal leader peptide consisting of amino acids 1-23 of the wild-type RAGE polypeptide.

42. The fusion protein of claim 41, wherein the human RAGE polypeptide that does not include an N-terminal leader peptide consisting of amino acids 1-23 of the wild-type RAGE polypeptide comprises the sequence as set forth in SEQ ID NO: 20 or SEQ ID NO: 20 having the N-terminal glutamine cyclized to form pyroglutamic acid.

43. The fusion protein of claim 30, wherein the immunoglobulin polypeptide comprises a fragment of a C_{H}2 domain which does not include at least a portion of the hinge region.

44. The fusion protein of claim 43, wherein the hinge region that is not included in the fragment of the C_{H}2 domain has the sequence as set forth in SEQ ID NO: 223 or SEQ ID NO: 224.

45. The fusion protein of claim 43, wherein the C_{H}2 domain is linked via its C-terminus to the N-terminus of a C_{H}3 domain of an immunoglobulin polypeptide.

46. The fusion protein of claim 30, wherein the immunoglobulin comprises a human IgG.

47. The fusion protein of claim 30, wherein the C_{H}2 domain of the immunoglobulin comprises SEQ ID NO: 38, or SEQ ID NO: 38 without the C-terminal lysine.

48. The fusion protein of claim 30, wherein the fusion protein is in the form of a monomer, a dimer, a trimer, a tetramer, or a mixture thereof.

49. A fusion protein comprising a RAGE polypeptide comprising an amino acid sequence as set forth in any one of SEQ ID NOs: 58-82, SEQ ID NOs: 92-190, or SEQ ID NOs: 200 or 201.

50. A fusion protein comprising a RAGE polypeptide wherein the RAGE polypeptide sequence is as set forth in any one of SEQ ID NOs: 58-82, SEQ ID NOs: 92-190, or SEQ ID NOs: 200 or 201.

51. A composition comprising a fusion protein comprising a Receptor for Advanced Glycation Endproducts (RAGE) polypeptide linked to an immunoglobulin polypeptide, wherein the RAGE polypeptide comprises a fragment of a mammalian RAGE having a ligand binding domain, and wherein the RAGE fusion protein comprises at least one mutation relative to the wild-type sequence in at least one of the RAGE polypeptide or the immunoglobulin polypeptide, wherein the mutation removes and/or alters at least one of a glycosylation site or an enzyme cleavage site and a pharmaceutically acceptable carrier.

52. An isolated nucleic acid encoding a fusion protein comprising a Receptor for Advanced Glycation Endproducts (RAGE) polypeptide linked to an immunoglobulin polypeptide, wherein the RAGE polypeptide comprises a fragment of a mammalian RAGE having a ligand binding domain, and wherein the RAGE fusion protein comprises at least one mutation relative to the wild-type sequence in at least one of the RAGE polypeptide or the immunoglobulin polypeptide, wherein the mutation removes and/or alters at least one of a glycosylation site or an enzyme cleavage site.

53. An expression vector comprising a nucleic acid encoding a fusion protein comprising a Receptor for Advanced Glycation Endproducts (RAGE) polypeptide linked to an immunoglobulin polypeptide, wherein the RAGE polypeptide comprises a fragment of a mammalian RAGE having a ligand binding domain, and wherein the RAGE fusion protein comprises at least one mutation relative to the wild-type sequence in at least one of the RAGE polypeptide or the immunoglobulin polypeptide, wherein the mutation removes and/or alters at least one of a glycosylation site or an enzyme cleavage site.

54. A host cell transfected with an expression vector comprising a nucleic acid encoding a fusion protein comprising a Receptor for Advanced Glycation Endproducts (RAGE) polypeptide linked to an immunoglobulin polypeptide, wherein the RAGE polypeptide comprises a fragment of a mammalian RAGE having a ligand binding domain, and wherein the RAGE fusion protein comprises at least one mutation relative to the wild-type sequence in at least one of the RAGE polypeptide or the immunoglobulin polypeptide, wherein the mutation removes and/or alters at least one of a glycosylation site or an enzyme cleavage site.

55. A method for treating a RAGE-mediated disorder in a subject comprising administering to a subject a composition comprising a fusion protein comprising a Receptor for Advanced Glycation Endproducts (RAGE) polypeptide linked to an immunoglobulin polypeptide, wherein the RAGE polypeptide comprises a fragment of a mammalian RAGE having a ligand binding domain, and wherein the RAGE fusion protein comprises at least one mutation relative to the wild-type sequence in at least one of the RAGE polypeptide or the immunoglobulin polypeptide, wherein the mutation removes and/or alters at least one of a glycosylation site or an enzyme cleavage site.

56. The method of claim 55, wherein the RAGE-mediated disorder comprises a symptom of diabetes or diabetic late complications.

57. The method of claim 56, wherein the symptom of diabetes or diabetic late complications comprises at least one of diabetic nephropathy, diabetic retinopathy, a diabetic foot ulcer, a cardiovascular complication, or diabetic neuropathy.

58. The method of claim 55, wherein the RAGE-mediated disorder comprises at least one of amyloidosis, Alzheimer's disease, cancer, kidney failure, inflammation associated with autoimmunity, inflammatory bowel disease, rheumatoid arthritis, psoriasis, multiple sclerosis, hypoxia, stroke, heart attack, hemorrhagic shock, sepsis, organ transplantation, or impaired wound healing.

The application's sequence listing, which the Patent Office published only in electronic form, follows.

SEQUENCE LISTING (232 sequences)

SEQ ID NO: 1 - protein, 404 aa, Homo sapiens
MAAGTAVGAWVLVLSLWGAVVGAQNITARIGEPLVLKCKGAPKKPPQRLEWKLNTGRTEAWKVLSPQGGGPWDSVARVLPNGSLFLPAVGIQDEGIFRCQAMNRNGKETKSNYRVRVYQIPGKPEIVDSASELTAGVPNKVGTCVSEGSYPAGTLSWHLDGKPLVPNEKGVSVKEQTRRHPETGLFTLQSELMVTPARGGDPRPTFSCSFSPGLPRHRALRTAPIQPRVWEPVPLEEVQLVVEPEGGAVAPGGTVTLTCEVPAQPSPQIHWMKDGVPLPLPPSPVLILPEIGPQDQGTYSCVATHSSHGPQESRAVSISIIEPGEEGPTAGSVGGSGLGTLALALGILGGLGTAALLIGVILWQRRQRRGEERKAPENQEEEEERAELNQSEEPEAGESSTGGP

SEQ ID NO: 2 - protein, 382 aa, Homo sapiens
AQNITARIGEPLVLKCKGAPKKPPQRLEWKLNTGRTEAWKVLSPQGGGPWDSVARVLPNGSLFLPAVGIQDEGIFRCQAMNRNGKETKSNYRVRVYQIPGKPEIVDSASELTAGVPNKVGTCVSEGSYPAGTLSWHLDGKPLVPNEKGVSVKEQTRRHPETGLFTLQSELMVTPARGGDPRPTFSCSFSPGLPRHRALRTAPIQPRVWEPVPLEEVQLVVEPEGGAVAPGGTVTLTCEVPAQPSPQIHWMKDGVPLPLPPSPVLILPEIGPQDQGTYSCVATHSSHGPQESRAVSISIIEPGEEGPTAGSVGGSGLGTLALALGILGGLGTAALLIGVILWQRRQRRGEERKAPENQEEEEERAELNQSEEPEAGESSTGGP

SEQ ID NO: 3 - protein, 381 aa, Homo sapiens
QNITARIGEPLVLKCKGAPKKPPQRLEWKLNTGRTEAWKVLSPQGGGPWDSVARVLPNGSLFLPAVGIQDEGIFRCQAMNRNGKETKSNYRVRVYQIPGKPEIVDSASELTAGVPNKVGTCVSEGSYPAGTLSWHLDGKPLVPNEKGVSVKEQTRRHPETGLFTLQSELMVTPARGGDPRPTFSCSFSPGLPRHRALRTAPIQPRVWEPVPLEEVQLVVEPEGGAVAPGGTVTLTCEVPAQPSPQIHWMKDGVPLPLPPSPVLILPEIGPQDQGTYSCVATHSSHGPQESRAVSISIIEPGEEGPTAGSVGGSGLGTLALALGILGGLGTAALLIGVILWQRRQRRGEERKAPENQEEEEERAELNQSEEPEAGESSTGGP

SEQ ID NO: 4 - protein, 339 aa, Homo sapiens
MAAGTAVGAWVLVLSLWGAVVGAQNITARIGEPLVLKCKGAPKKPPQRLEWKLNTGRTEAWKVLSPQGGGPWDSVARVLPNGSLFLPAVGIQDEGIFRCQAMNRNGKETKSNYRVRVYQIPGKPEIVDSASELTAGVPNKVGTCVSEGSYPAGTLSWHLDGKPLVPNEKGVSVKEQTRRHPETGLFTLQSELMVTPARGGDPRPTFSCSFSPGLPRHRALRTAPIQPRVWEPVPLEEVQLVVEPEGGAVAPGGTVTLTCEVPAQPSPQIHWMKDGVPLPLPPSPVLILPEIGPQDQGTYSCVATHSSHGPQESRAVSISIIEPGEEGPTAGSVGGSGLG

SEQ ID NO: 5 - protein, 317 aa, Homo sapiens
AQNITARIGEPLVLKCKGAPKKPPQRLEWKLNTGRTEAWKVLSPQGGGPWDSVARVLPNGSLFLPAVGIQDEGIFRCQAMNRNGKETKSNYRVRVYQIPGKPEIVDSASELTAGVPNKVGTCVSEGSYPAGTLSWHLDGKPLVPNEKGVSVKEQTRRHPETGLFTLQSELMVTPARGGDPRPTFSCSFSPGLPRHRALRTAPIQPRVWEPVPLEEVQLVVEPEGGAVAPGGTVTLTCEVPAQPSPQIHWMKDGVPLPLPPSPVLILPEIGPQDQGTYSCVATHSSHGPQESRAVSISIIEPGEEGPTAGSVGGSGLG

SEQ ID NO: 6 - protein, 316 aa, Homo sapiens
QNITARIGEPLVLKCKGAPKKPPQRLEWKLNTGRTEAWKVLSPQGGGPWDSVARVLPNGSLFLPAVGIQDEGIFRCQAMNRNGKETKSNYRVRVYQIPGKPEIVDSASELTAGVPNKVGTCVSEGSYPAGTLSWHLDGKPLVPNEKGVSVKEQTRRHPETGLFTLQSELMVTPARGGDPRPTFSCSFSPGLPRHRALRTAPIQPRVWEPVPLEEVQLVVEPEGGAVAPGGTVTLTCEVPAQPSPQIHWMKDGVPLPLPPSPVLILPEIGPQDQGTYSCVATHSSHGPQESRAVSISIIEPGEEGPTAGSVGGSGLG

SEQ ID NO: 7 - protein, 94 aa, Homo sapiens
AQNITARIGEPLVLKCKGAPKKPPQRLEWKLNTGRTEAWKVLSPQGGGPWDSVARVLPNGSLFLPAVGIQDEGIFRCQAMNRNGKETKSNYRVR

SEQ ID NO: 8 - protein, 93 aa, Homo sapiens
QNITARIGEPLVLKCKGAPKKPPQRLEWKLNTGRTEAWKVLSPQGGGPWDSVARVLPNGSLFLPAVGIQDEGIFRCQAMNRNGKETKSNYRVR

SEQ ID NO: 9 - protein, 30 aa, Homo sapiens
AQNITARIGEPLVLKCKGAPKKPPQRLEWK

SEQ ID NO: 10 - protein, 29 aa, Homo sapiens
QNITARIGEPLVLKCKGAPKKPPQRLEWK

SEQ ID NO: 11 - protein, 98 aa, Homo sapiens
PEIVDSASELTAGVPNKVGTCVSEGSYPAGTLSWHLDGKPLVPNEKGVSVKEQTRRHPETGLFTLQSELMVTPARGGDPRPTFSCSFSPGLPRHRALR

SEQ ID NO: 12 - protein, 91 aa, Homo sapiens
PRVWEPVPLEEVQLVVEPEGGAVAPGGTVTLTCEVPAQPSPQIHWMKDGVPLPLPPSPVLILPEIGPQDQGTYSCVATHSSHGPQESRAVS

SEQ ID NO: 13 - protein, 101 aa, Homo sapiens
AQNITARIGEPLVLKCKGAPKKPPQRLEWKLNTGRTEAWKVLSPQGGGPWDSVARVLPNGSLFLPAVGIQDEGIFRCQAMNRNGKETKSNYRVRVYQIPGK

SEQ ID NO: 14 - protein, 100 aa, Homo sapiens
QNITARIGEPLVLKCKGAPKKPPQRLEWKLNTGRTEAWKVLSPQGGGPWDSVARVLPNGSLFLPAVGIQDEGIFRCQAMNRNGKETKSNYRVRVYQIPGK

SEQ ID NO: 15 - protein, 114 aa, Homo sapiens
AQNITARIGEPLVLKCKGAPKKPPQRLEWKLNTGRTEAWKVLSPQGGGPWDSVARVLPNGSLFLPAVGIQDEGIFRCQAMNRNGKETKSNYRVRVYQIPGKPEIVDSASELTAG

SEQ ID NO: 16 - protein, 113 aa, Homo sapiens
QNITARIGEPLVLKCKGAPKKPPQRLEWKLNTGRTEAWKVLSPQGGGPWDSVARVLPNGSLFLPAVGIQDEGIFRCQAMNRNGKETKSNYRVRVYQIPGKPEIVDSASELTAG

SEQ ID NO: 17 - protein, 204 aa, Homo sapiens
AQNITARIGEPLVLKCKGAPKKPPQRLEWKLNTGRTEAWKVLSPQGGGPWDSVARVLPNGSLFLPAVGIQDEGIFRCQAMNRNGKETKSNYRVRVYQIPGKPEIVDSASELTAGVPNKVGTCVSEGSYPAGTLSWHLDGKPLVPNEKGVSVKEQTRRHPETGLFTLQSELMVTPARGGDPRPTFSCSFSPGLPRHRALRTAPIQ

SEQ ID NO: 18 - protein, 203 aa, Homo sapiens
QNITARIGEPLVLKCKGAPKKPPQRLEWKLNTGRTEAWKVLSPQGGGPWDSVARVLPNGSLFLPAVGIQDEGIFRCQAMNRNGKETKSNYRVRVYQIPGKPEIVDSASELTAGVPNKVGTCVSEGSYPAGTLSWHLDGKPLVPNEKGVSVKEQTRRHPETGLFTLQSELMVTPARGGDPRPTFSCSFSPGLPRHRALRTAPIQ

SEQ ID NO: 19 - protein, 229 aa, Homo sapiens
AQNITARIGEPLVLKCKGAPKKPPQRLEWKLNTGRTEAWKVLSPQGGGPWDSVARVLPNGSLFLPAVGIQDEGIFRCQAMNRNGKETKSNYRVRVYQIPGKPEIVDSASELTAGVPNKVGTCVSEGSYPAGTLSWHLDGKPLVPNEKGVSVKEQTRRHPETGLFTLQSELMVTPARGGDPRPTFSCSFSPGLPRHRALRTAPIQPRVWEPVPLEEVQLVVEPEGGAVAP

SEQ ID NO: 20 - protein, 228 aa, Homo sapiens
QNITARIGEPLVLKCKGAPKKPPQRLEWKLNTGRTEAWKVLSPQGGGPWDSVARVLPNGSLFLPAVGIQDEGIFRCQAMNRNGKETKSNYRVRVYQIPGKPEIVDSASELTAGVPNKVGTCVSEGSYPAGTLSWHLDGKPLVPNEKGVSVKEQTRRHPETGLFTLQSELMVTPARGGDPRPTFSCSFSPGLPRHRALRTAPIQPRVWEPVPLEEVQLVVEPEGGAVAP

SEQ ID NO: 21 - protein, 7 aa, Homo sapiens
VYQIPGK

SEQ ID NO: 22 - protein, 30 aa, Homo sapiens
TAPIQPRVWEPVPLEEVQLVVEPEGGAVAP

SEQ ID NO: 23 - protein, 20 aa, Homo sapiens
VYQIPGKPEIVDSASELTAG

SEQ ID NO: 24 - protein, 5 aa, Homo sapiens
TAPIQ

SEQ ID NO: 25 - DNA, 354 bp, Homo sapiens
atggcagccggaacagcagttggagcctgggtgctggtcctcagtctgtggggggcagtagtaggtgctcaaaacatcacagcccggattggcgagccactggtgctgaagtgtaagggggcccccaagaaaccaccccagcggctggaatggaaactgaacacaggccggacagaagcttggaaggtcctgtctccccagggaggaggcccctgggacagtgtggctcgtgtccttcccaacggctccctcttccttccggctgtcgggatccaggatgaggggattttccggtgccaggcaatgaacaggaatggaaaggagaccaagtccaactaccgagtccgtgtctac

SEQ ID NO: 26 - DNA, 369 bp, Homo sapiens
atggcagccggaacagcagttggagcctgggtgctggtcctcagtctgtggggggcagtagtaggtgctcaaaacatcacagcccggattggcgagccactggtgctgaagtgtaagggggcccccaagaaaccaccccagcggctggaatggaaactgaacacaggccggacagaagcttggaaggtcctgtctccccagggaggaggcccctgggacagtgtggctcgtgtccttcccaacggctccctcttccttccggctgtcgggatccaggatgaggggattttccggtgccaggcaatgaacaggaatggaaaggagaccaagtccaactaccgagtccgtgtctaccagattcctgggaag

SEQ ID NO: 27 - DNA, 408 bp, Homo sapiens
atggcagccggaacagcagttggagcctgggtgctggtcctcagtctgtggggggcagtagtaggtgctcaaaacatcacagcccggattggcgagccactggtgctgaagtgtaagggggcccccaagaaaccaccccagcggctggaatggaaactgaacacaggccggacagaagcttggaaggtcctgtctccccagggaggaggcccctgggacagtgtggctcgtgtccttcccaacggctccctcttccttccggctgtcgggatccaggatgaggggattttccggtgccaggcaatgaacaggaatggaaaggagaccaagtccaactaccgagtccgtgtctaccagattcctgggaagccagaaattgtagattctgcctctgaactcacggctggt

SEQ ID NO: 28 - DNA, 690 bp, Homo sapiens
atggcagccggaacagcagttggagcctgggtgctggtcctcagtctgtggggggcagtagtaggtgctcaaaacatcacagcccggattggcgagccactggtgctgaagtgtaagggggcccccaagaaaccaccccagcggctggaatggaaactgaacacaggccggacagaagcttggaaggtcctgtctccccagggaggaggcccctgggacagtgtggctcgtgtccttcccaacggctccctcttccttccggctgtcgggatccaggatgaggggattttccggtgccaggcaatgaacaggaatggaaaggagaccaagtccaactaccgagtccgtgtctaccagattcctgggaagccagaaattgtagattctgcctctgaactcacggctggtgttcccaataaggtggggacatgtgtgtcagaggggagctaccctgcagggactcttagctggcacttggatgggaagcccctggtgcctaatgagaagggagtatctgtgaaggaacagaccaggagacaccctgagacagggctcttcacactgcagtcggagctaatggtgaccccagcccggggaggagatccccgtcccaccttctcctgtagcttcagcccaggccttccccgacaccgggccttgcgcacagcccccatccagccccgtgtctgg

SEQ ID NO: 29 - DNA, 753 bp, Homo sapiens
atggcagccggaacagcagttggagcctgggtgctggtcctcagtctgtggggggcagtagtaggtgctcaaaacatcacagcccggattggcgagccactggtgctgaagtgtaagggggcccccaagaaaccaccccagcggctggaatggaaactgaacacaggccggacagaagcttggaaggtcctgtctccccagggaggaggcccctgggacagtgtggctcgtgtccttcccaacggctccctcttccttccggctgtcgggatccaggatgaggggattttccggtgccaggcaatgaacaggaatggaaaggagaccaagtccaactaccgagtccgtgtctaccagattcctgggaagccagaaattgtagattctgcctctgaactcacggctggtgttcccaataaggtggggacatgtgtgtcagaggggagctaccctgcagggactcttagctggcacttggatgggaagcccctggtgcctaatgagaagggagtatctgtgaaggaacagaccaggagacaccctgagacagggctcttcacactgcagtcggagctaatggtgaccccagcccggggaggagatccccgtcccaccttctcctgtagcttcagcccaggccttccccgacaccgggccttgcgcacagcccccatccagccccgtgtctgggagcctgtgcctctggaggaggtccaattggtggtggagccagaaggtggagcagtagctcct

SEQ ID NO: 30 - DNA, 1386 bp, Artificial Sequence
  Synthetic polynucleotide
atggcagccggaacagcagttggagcctgggtgctggtcctcagtctgtggggggcagtagtaggtgctcaaaacatcacagcccggattggcgagccactggtgctgaagtgtaagggggcccccaagaaaccaccccagcggctggaatggaaactgaacacaggccggacagaagcttggaaggtcctgtctccccagggaggaggcccctgggacagtgtggctcgtgtccttcccaacggctccctcttccttccggctgtcgggatccaggatgaggggattttccggtgccaggcaatgaacaggaatggaaaggagaccaagtccaactaccgagtccgtgtctaccagattcctgggaagccagaaattgtagattctgcctctgaactcacggctggtgttcccaataaggtggggacatgtgtgtcagaggggagctaccctgcagggactcttagctggcacttggatgggaagcccctggtgcctaatgagaagggagtatctgtgaaggaacagaccaggagacaccctgagacagggctcttcacactgcagtcggagctaatggtgaccccagcccggggaggagatccccgtcccaccttctcctgtagcttcagcccaggccttccccgacaccgggccttgcgcacagcccccatccagccccgtgtctgggagcctgtgcctctggaggaggtccaattggtggtggagccagaaggtggagcagtagctcctccgtcagtcttcctcttccccccaaaacccaaggacaccctcatgatctcccggacccctgaggtcacatgcgtggtggtggacgtgagccacgaagaccctgaggtcaagttcaactggtacgtggacggcgtggaggtgcataatgccaagacaaagccgcgggaggagcagtacaacagcacgtaccgtgtggtcagcgtcctcaccgtcctgcaccaggactggctgaatggcaaggagtacaagtgcaaggtctccaacaaagccctcccagcccccatcgagaaaaccatctccaaagccaaagggcagccccgagaaccacaggtgtacaccctgcccccatcccgggatgagctgaccaagaaccaggtcagcctgacctgcctggtcaaaggcttctatcccagcgacatcgccgtggagtgggagagcaatgggcagccggagaacaactacaagaccacgcctcccgtgctggactccgacggctccttcttcctctacagcaagctcaccgtggacaagagcaggtggcagcaggggaacgtcttctcatgctccgtgatgcatgaggctctgcacaaccactacacgcagaagagcctctccctgtctccgggtaaatga

SEQ ID NO: 31 - DNA, 1041 bp, Artificial Sequence
  Synthetic polynucleotide
atggcagccggaacagcagttggagcctgggtgctggtcctcagtctgtggggggcagtagtaggtgctcaaaacatcacagcccggattggcgagccactggtgctgaagtgtaagggggcccccaagaaaccaccccagcggctggaatggaaactgaacacaggccggacagaagcttggaaggtcctgtctccccagggaggaggcccctgggacagtgtggctcgtgtccttcccaacggctccctcttccttccggctgtcgggatccaggatgaggggattttccggtgccaggcaatgaacaggaatggaaaggagaccaagtccaactaccgagtccgtgtctaccagattcctgggaagccagaaattgtagattctgcctctgaactcacggctggtccgtcagtcttcctcttccccccaaaacccaaggacaccctcatgatctcccggacccctgaggtcacatgcgtggtggtggacgtgagccacgaagaccctgaggtcaagttcaactggtacgtggacggcgtggaggtgcataatgccaagacaaagccgcgggaggagcagtacaacagcacgtaccgtgtggtcagcgtcctcaccgtcctgcaccaggactggctgaatggcaaggagtacaagtgcaaggtctccaacaaagccctcccagcccccatcgagaaaaccatctccaaagccaaagggcagccccgagaaccacaggtgtacaccctgcccccatcccgggatgagctgaccaagaaccaggtcagcctgacctgcctggtcaaaggcttctatcccagcgacatcgccgtggagtgggagagcaatgggcagccggagaacaactacaagaccacgcctcccgtgctggactccgacggctccttcttcctctacagcaagctcaccgtggacaagagcaggtggcagcaggggaacgtcttctcatgctccgtgatgcatgaggctctgcacaaccactacacgcagaagagcctctccctgtctccgggtaaatga

SEQ ID NO: 32 - protein, 461 aa, Artificial Sequence
  Synthetic polypeptide
MAAGTAVGAWVLVLSLWGAVVGAQNITARIGEPLVLKCKGAPKKPPQRLEWKLNTGRTEAWKVLSPQGGGPWDSVARVLPNGSLFLPAVGIQDEGIFRCQAMNRNGKETKSNYRVRVYQIPGKPEIVDSASELTAGVPNKVGTCVSEGSYPAGTLSWHLDGKPLVPNEKGVSVKEQTRRHPETGLFTLQSELMVTPARGGDPRPTFSCSFSPGLPRHRALRTAPIQPRVWEPVPLEEVQLVVEPEGGAVAPPSVFLFPPKPKDTLMISRTPEVTCVVVDVSHEDPEVKFNWYVDGVEVHNAKTKPREEQYNSTYRVVSVLTVLHQDWLNGKEYKCKVSNKALPAPIEKTISKAKGQPREPQVYTLPPSRDELTKNQVSLTCLVKGFYPSDIAVEWESNGQPENNYKTTPPVLDSDGSFFLYSKLTVDKSRWQQGNVFSCSVMHEALHNHYTQKSLSLSPGK

SEQ ID NO: 33 - protein, 439 aa, Artificial Sequence
  Synthetic polypeptide
AQNITARIGEPLVLKCKGAPKKPPQRLEWKLNTGRTEAWKVLSPQGGGPWDSVARVLPNGSLFLPAVGIQDEGIFRCQAMNRNGKETKSNYRVRVYQIPGKPEIVDSASELTAGVPNKVGTCVSEGSYPAGTLSWHLDGKPLVPNEKGVSVKEQTRRHPETGLFTLQSELMVTPARGGDPRPTFSCSFSPGLPRHRALRTAPIQPRVWEPVPLEEVQLVVEPEGGAVAPPSVFLFPPKPKDTLMISRTPEVTCVVVDVSHEDPEVKFNWYVDGVEVHNAKTKPREEQYNSTYRVVSVLTVLHQDWLNGKEYKCKVSNKALPAPIEKTISKAKGQPREPQVYTLPPSRDELTKNQVSLTCLVKGFYPSDIAVEWESNGQPENNYKTTPPVLDSDGSFFLYSKLTVDKSRWQQGNVFSCSVMHEALHNHYTQKSLSLSPGK

SEQ ID NO: 34 - protein, 438 aa, Artificial Sequence
  Synthetic polypeptide
QNITARIGEPLVLKCKGAPKKPPQRLEWKLNTGRTEAWKVLSPQGGGPWDSVARVLPNGSLFLPAVGIQDEGIFRCQAMNRNGKETKSNYRVRVYQIPGKPEIVDSASELTAGVPNKVGTCVSEGSYPAGTLSWHLDGKPLVPNEKGVSVKEQTRRHPETGLFTLQSELMVTPARGGDPRPTFSCSFSPGLPRHRALRTAPIQPRVWEPVPLEEVQLVVEPEGGAVAPPSVFLFPPKPKDTLMISRTPEVTCVVVDVSHEDPEVKFNWYVDGVEVHNAKTKPREEQYNSTYRVVSVLTVLHQDWLNGKEYKCKVSNKALPAPIEKTISKAKGQPREPQVYTLPPSRDELTKNQVSLTCLVKGFYPSDIAVEWESNGQPENNYKTTPPVLDSDGSFFLYSKLTVDKSRWQQGNVFSCSVMHEALHNHYTQKSLSLSPGK

SEQ ID NO: 35 - protein, 346 aa, Artificial Sequence
  Synthetic polypeptide
MAAGTAVGAWVLVLSLWGAVVGAQNITARIGEPLVLKCKGAPKKPPQRLEWKLNTGRTEAWKVLSPQGGGPWDSVARVLPNGSLFLPAVGIQDEGIFRCQAMNRNGKETKSNYRVRVYQIPGKPEIVDSASELTAGPSVFLFPPKPKDTLMISRTPEVTCVVVDVSHEDPEVKFNWYVDGVEVHNAKTKPREEQYNSTYRVVSVLTVLHQDWLNGKEYKCKVSNKALPAPIEKTISKAKGQPREPQVYTLPPSRDELTKNQVSLTCLVKGFYPSDIAVEWESNGQPENNYKTTPPVLDSDGSFFLYSKLTVDKSRWQQGNVFSCSVMHEALHNHYTQKSLSLSPGK

SEQ ID NO: 36 - protein, 324 aa, Artificial Sequence
  Synthetic polypeptide
AQNITARIGEPLVLKCKGAPKKPPQRLEWKLNTGRTEAWKVLSPQGGGPWDSVARVLPNGSLFLPAVGIQDEGIFRCQAMNRNGKETKSNYRVRVYQIPGKPEIVDSASELTAGPSVFLFPPKPKDTLMISRTPEVTCVVVDVSHEDPEVKFNWYVDGVEVHNAKTKPREEQYNSTYRVVSVLTVLHQDWLNGKEYKCKVSNKALPAPIEKTISKAKGQPREPQVYTLPPSRDELTKNQVSLTCLVKGFYPSDIAVEWESNGQPENNYKTTPPVLDSDGSFFLYSKLTVDKSRWQQGNVFSCSVMHEALHNHYTQKSLSLSPGK

SEQ ID NO: 37 - protein, 323 aa, Artificial Sequence
  Synthetic polypeptide
QNITARIGEPLVLKCKGAPKKPPQRLEWKLNTGRTEAWKVLSPQGGGPWDSVARVLPNGSLFLPAVGIQDEGIFRCQAMNRNGKETKSNYRVRVYQIPGKPEIVDSASELTAGPSVFLFPPKPKDTLMISRTPEVTCVVVDVSHEDPEVKFNWYVDGVEVHNAKTKPREEQYNSTYRVVSVLTVLHQDWLNGKEYKCKVSNKALPAPIEKTISKAKGQPREPQVYTLPPSRDELTKNQVSLTCLVKGFYPSDIAVEWESNGQPENNYKTTPPVLDSDGSFFLYSKLTVDKSRWQQGNVFSCSVMHEALHNHYTQKSLSLSPGK

SEQ ID NO: 38 - protein, 210 aa, Homo sapiens
PSVFLFPPKPKDTLMISRTPEVTCVVVDVSHEDPEVKFNWYVDGVEVHNAKTKPREEQYNSTYRVVSVLTVLHQDWLNGKEYKCKVSNKALPAPIEKTISKAKGQPREPQVYTLPPSRDELTKNQVSLTCLVKGFYPSDIAVEWESNGQPENNYKTTPPVLDSDGSFFLYSKLTVDKSRWQQGNVFSCSVMHEALHNHYTQKSLSLSPGK

SEQ ID NO: 39 - DNA, 633 bp, Homo sapiens
ccgtcagtcttcctcttccccccaaaacccaaggacaccctcatgatctcccggacccctgaggtcacatgcgtggtggtggacgtgagccacgaagaccctgaggtcaagttcaactggtacgtggacggcgtggaggtgcataatgccaagacaaagccgcgggaggagcagtacaacagcacgtaccgtgtggtcagcgtcctcaccgtcctgcaccaggactggctgaatggcaaggagtacaagtgcaaggtctccaacaaagccctcccagcccccatcgagaaaaccatctccaaagccaaagggcagccccgagaaccacaggtgtacaccctgcccccatcccgggatgagctgaccaagaaccaggtcagcctgacctgcctggtcaaaggcttctatcccagcgacatcgccgtggagtgggagagcaatgggcagccggagaacaactacaagaccacgcctcccgtgctggactccgacggctccttcttcctctacagcaagctcaccgtggacaagagcaggtggcagcaggggaacgtcttctcatgctccgtgatgcatgaggctctgcacaaccactacacgcagaagagcctctccctgtctccgggtaaatga

SEQ ID NO: 40 - protein, 220 aa, Homo sapiens
PCPAPELLGGPSVFLFPPKPKDTLMISRTPEVTCVVVDVSHEDPEVKFNWYVDGVEVHNAKTKPREEQYNSTYRVVSVLTVLHQDWLNGKEYKCKVSNKALPAPIEKTISKAKGQPREPQVYTLPPSRDELTKNQVSLTCLVKGFYPSDIAVEWESNGQPENNYKTTPPVLDSDGSFFLYSKLTVDKSRWQQGNVFSCSVMHEALHNHYTQKSLSLSPGK

SEQ ID NO: 41 - DNA, 663 bp, Homo sapiens
ccgtgcccagcacctgaactcctggggggaccgtcagtcttcctcttccccccaaaacccaaggacaccctcatgatctcccggacccctgaggtcacatgcgtggtggtggacgtgagccacgaagaccctgaggtcaagttcaactggtacgtggacggcgtggaggtgcataatgccaagacaaagccgcgggaggagcagtacaacagcacgtaccgtgtggtcagcgtcctcaccgtcctgcaccaggactggctgaatggcaaggagtacaagtgcaaggtctccaacaaagccctcccagcccccatcgagaaaaccatctccaaagccaaagggcagccccgagaaccacaggtgtacaccctgcccccatcccgggatgagctgaccaagaaccaggtcagcctgacctgcctggtcaaaggcttctatcccagcgacatcgccgtggagtgggagagcaatgggcagccggagaacaactacaagaccacgcctcccgtgctggactccgacggctccttcttcctctacagcaagctcaccgtggacaagagcaggtggcagcaggggaacgtcttctcatgctccgtgatgcatgaggctctgcacaaccactacacgcagaagagcctctccctgtctccgggtaaatga

SEQ ID NO: 42 - protein, 113 aa, Homo sapiens
PCPAPELLGGPSVFLFPPKPKDTLMISRTPEVTCVVVDVSHEDPEVKFNWYVDGVEVHNAKTKPREEQYNSTYRVVSVLTVLHQDWLNGKEYKCKVSNKALPAPIEKTISKAK

SEQ ID NO: 43 - protein, 107 aa, Homo sapiens
GQPREPQVYTLPPSRDELTKNQVSLTCLVKGFYPSDIAVEWESNGQPENNYKTTPPVLDSDGSFFLYSKLTVDKSRWQQGNVFSCSVMHEALHNHYTQKSLSLSPGK

SEQ ID NO: 44 - protein, 25 aa, Homo sapiens
ISIIEPGEEGPTAGSVGGSGLGTLA

SEQ ID NO: 45 - protein, 316 aa, Homo sapiens
  MISC_FEATURE (1)..(1): Xaa = pyroglutamic acid
XNITARIGEPLVLKCKGAPKKPPQRLEWKLNTGRTEAWKVLSPQGGGPWDSVARVLPNGSLFLPAVGIQDEGIFRCQAMNRNGKETKSNYRVRVYQIPGKPEIVDSASELTAGVPNKVGTCVSEGSYPAGTLSWHLDGKPLVPNEKGVSVKEQTRRHPETGLFTLQSELMVTPARGGDPRPTFSCSFSPGLPRHRALRTAPIQPRVWEPVPLEEVQLVVEPEGGAVAPGGTVTLTCEVPAQPSPQIHWMKDGVPLPLPPSPVLILPEIGPQDQGTYSCVATHSSHGPQESRAVSISIIEPGEEGPTAGSVGGSGLG

SEQ ID NO: 46 - protein, 93 aa, Homo sapiens
  MISC_FEATURE (1)..(1): Xaa = pyroglutamic acid
XNITARIGEPLVLKCKGAPKKPPQRLEWKLNTGRTEAWKVLSPQGGGPWDSVARVLPNGSLFLPAVGIQDEGIFRCQAMNRNGKETKSNYRVR

SEQ ID NO: 47 - protein, 29 aa, Homo sapiens
  MISC_FEATURE (1)..(1): Xaa = pyroglutamic acid
XNITARIGEPLVLKCKGAPKKPPQRLEWK

SEQ ID NO: 48 - protein, 100 aa, Homo sapiens
  MISC_FEATURE (1)..(1): Xaa = pyroglutamic acid
XNITARIGEPLVLKCKGAPKKPPQRLEWKLNTGRTEAWKVLSPQGGGPWDSVARVLPNGSLFLPAVGIQDEGIFRCQAMNRNGKETKSNYRVRVYQIPGK

SEQ ID NO: 49 - protein, 113 aa, Homo sapiens
  MISC_FEATURE (1)..(1): Xaa = pyroglutamic acid
XNITARIGEPLVLKCKGAPKKPPQRLEWKLNTGRTEAWKVLSPQGGGPWDSVARVLPNGSLFLPAVGIQDEGIFRCQAMNRNGKETKSNYRVRVYQIPGKPEIVDSASELTAG

SEQ ID NO: 50 - protein, 203 aa, Homo sapiens
  MISC_FEATURE (1)..(1): Xaa = pyroglutamic acid
XNITARIGEPLVLKCKGAPKKPPQRLEWKLNTGRTEAWKVLSPQGGGPWDSVARVLPNGSLFLPAVGIQDEGIFRCQAMNRNGKETKSNYRVRVYQIPGKPEIVDSASELTAGVPNKVGTCVSEGSYPAGTLSWHLDGKPLVPNEKGVSVKEQTRRHPETGLFTLQSELMVTPARGGDPRPTFSCSFSPGLPRHRALRTAPIQ

SEQ ID NO: 51 - protein, 228 aa, Homo sapiens
  MISC_FEATURE (1)..(1): Xaa = pyroglutamic acid
XNITARIGEPLVLKCKGAPKKPPQRLEWKLNTGRTEAWKVLSPQGGGPWDSVARVLPNGSLFLPAVGIQDEGIFRCQAMNRNGKETKSNYRVRVYQIPGKPEIVDSASELTAGVPNKVGTCVSEGSYPAGTLSWHLDGKPLVPNEKGVSVKEQTRRHPETGLFTLQSELMVTPARGGDPRPTFSCSFSPGLPRHRALRTAPIQPRVWEPVPLEEVQLVVEPEGGAVAP

SEQ ID NO: 52 - DNA, 633 bp, Artificial Sequence
  Synthetic polynucleotide
ccgtcagtcttcctcttccccccaaaacccaaggacaccctcatgatctcccggacccctgaggtcacatgcgtggtggtggacgtgagccacgaagaccctgaggtcaagttcaactggtacgtggacggcgtggaggtgcataatgccaagacaaagccgcgggaggagcagtacaacagcacgtaccgtgtggtcagcgtcctcaccgtcctgcaccaggactggctgaatggcaaggagtacaagtgcaaggtctccaacaaagccctcccagcccccatcgagaaaaccatctccaaagccaaagggcagccccgagaaccacaggtgtacaccctgcccccatcccgggatgagctgaccaagaaccaggtcagcctgacctgcctggtcaaaggcttctatcccagcgacatcgccgtggagtgggagagcaatgggcagccggagaacaactacaagaccacgcctcccgtgctggactccgacggctccttcttcctctacagcaagctcaccgtggacaagagcaggtggcagcaggggaacgtcttctcatgctccgtgatgcatgaggctctgcacaaccactacacgcagaagagcctctccctgtctcccgggaaatga

SEQ ID NO: 53 - DNA, 663 bp, Artificial Sequence
  Synthetic polynucleotide
ccgtgcccagcacctgaactcctggggggaccgtcagtcttcctcttccccccaaaacccaaggacaccctcatgatctcccggacccctgaggtcacatgcgtggtggtggacgtgagccacgaagaccctgaggtcaagttcaactggtacgtggacggcgtggaggtgcataatgccaagacaaagccgcgggaggagcagtacaacagcacgtaccgtgtggtcagcgtcctcaccgtcctgcaccaggactggctgaatggcaaggagtacaagtgcaaggtctccaacaaagccctcccagcccccatcgagaaaaccatctccaaagccaaagggcagccccgagaaccacaggtgtacaccctgcccccatcccgggatgagctgaccaagaaccaggtcagcctgacctgcctggtcaaaggcttctatcccagcgacatcgccgtggagtgggagagcaatgggcagccggagaacaactacaagaccacgcctcccgtgctggactccgacggctccttcttcctctacagcaagctcaccgtggacaagagcaggtggcagcaggggaacgtcttctcatgctccgtgatgcatgaggctctgcacaaccactacacgcagaagagcctctccctgtctcccgggaaatga

SEQ ID NO: 54 - DNA, 1386 bp, Artificial Sequence
  Synthetic polynucleotide
atggcagccggaacagcagttggagcctgggtgctggtcctcagtctgtggggggcagtagtaggtgctcaaaacatcacagcccggattggcgagccactggtgctgaagtgtaagggggcccccaagaaaccaccccagcggctggaatggaaactgaacacaggccggacagaagcttggaaggtcctgtctccccagggaggaggcccctgggacagtgtggctcgtgtccttcccaacggctccctcttccttccggctgtcgggatccaggatgaggggattttccggtgccaggcaatgaacaggaatggaaaggagaccaagtccaactaccgagtccgtgtctaccagattcctgggaagccagaaattgtagattctgcctctgaactcacggctggtgttcccaataaggtggggacatgtgtgtcagaggggagctaccctgcagggactcttagctggcacttggatgggaagcccctggtgcctaatgagaagggagtatctgtgaaggaacagaccaggagacaccctgagacagggctcttcacactgcagtcggagctaatggtgaccccagcccggggaggagatccccgtcccaccttctcctgtagcttcagcccaggccttccccgacaccgggccttgcgcacagcccccatccagccccgtgtctgggagcctgtgcctctggaggaggtccaattggtggtggagccagaaggtggagcagtagctcctccgtcagtcttcctcttccccccaaaacccaaggacaccctcatgatctcccggacccctgaggtcacatgcgtggtggtggacgtgagccacgaagaccctgaggtcaagttcaactggtacgtggacggcgtggaggtgcataatgccaagacaaagccgcgggaggagcagtacaacagcacgtaccgtgtggtcagcgtcctcaccgtcctgcaccaggactggctgaatggcaaggagtacaagtgcaaggtctccaacaaagccctcccagcccccatcgagaaaaccatctccaaagccaaagggcagccccgagaaccacaggtgtacaccctgcccccatcccgggatgagctgaccaagaaccaggtcagcctgacctgcctggtcaaaggcttctatcccagcgacatcgccgtggagtgggagagcaatgggcagccggagaacaactacaagaccacgcctcccgtgctggactccgacggctccttcttcctctacagcaagctcaccgtggacaagagcaggtggcagcaggggaacgtcttctcatgctccgtgatgcatgaggctctgcacaaccactacacgcagaagagcctctccctgtctcccgggaaatga

SEQ ID NO: 55 - DNA, 1041 bp, Artificial Sequence
  Synthetic polynucleotide
atggcagccggaacagcagttggagcctgggtgctggtcctcagtctgtggggggcagtagtaggtgctcaaaacatcacagcccggattggcgagccactggtgctgaagtgtaagggggcccccaagaaaccaccccagcggctggaatggaaactgaacacaggccggacagaagcttggaaggtcctgtctccccagggaggaggcccctgggacagtgtggctcgtgtccttcccaacggctccctcttccttccggctgtcgggatccaggatgaggggattttccggtgccaggcaatgaacaggaatggaaaggagaccaagtccaactaccgagtccgtgtctaccagattcctgggaagccagaaattgtagattctgcctctgaactcacggctggtccgtcagtcttcctcttccccccaaaacccaaggacaccctcatgatctcccggacccctgaggtcacatgcgtggtggtggacgtgagccacgaagaccctgaggtcaagttcaactggtacgtggacggcgtggaggtgcataatgccaagacaaagccgcgggaggagcagtacaacagcacgtaccgtgtggtcagcgtcctcaccgtcctgcaccaggactggctgaatggcaaggagtacaagtgcaaggtctccaacaaagccctcccagcccccatcgagaaaaccatctccaaagccaaagggcagccccgagaaccacaggtgtacaccctgcccccatcccgggatgagctgaccaagaaccaggtcagcctgacctgcctggtcaaaggcttctatcccagcgacatcgccgtggagtgggagagcaatgggcagccggagaacaactacaagaccacgcctcccgtgctggactccgacggctccttcttcctctacagcaagctcaccgtggacaagagcaggtggcagcaggggaacgtcttctcatgctccgtgatgcatgaggctctgcacaaccactacacgcagaagagcctctccctgtctcccgggaaatga

SEQ ID NO: 56 - protein, 438 aa, Artificial Sequence
  Synthetic polypeptide
  MISC_FEATURE (1)..(1): Xaa = pyroglutamic acid
XNITARIGEPLVLKCKGAPKKPPQRLEWKLNTGRTEAWKVLSPQGGGPWDSVARVLPNGSLFLPAVGIQDEGIFRCQAMNRNGKETKSNYRVRVYQIPGKPEIVDSASELTAGVPNKVGTCVSEGSYPAGTLSWHLDGKPLVPNEKGVSVKEQTRRHPETGLFTLQSELMVTPARGGDPRPTFSCSFSPGLPRHRALRTAPIQPRVWEPVPLEEVQLVVEPEGGAVAPPSVFLFPPKPKDTLMISRTPEVTCVVVDVSHEDPEVKFNWYVDGVEVHNAKTKPREEQYNSTYRVVSVLTVLHQDWLNGKEYKCKVSNKALPAPIEKTISKAKGQPREPQVYTLPPSRDELTKNQVSLTCLVKGFYPSDIAVEWESNGQPENNYKTTPPVLDSDGSFFLYSKLTVDKSRWQQGNVFSCSVMHEALHNHYTQKSLSLSPGK

SEQ ID NO: 57 - protein, 323 aa, Artificial Sequence
  Synthetic polypeptide
  MISC_FEATURE (1)..(1): Xaa = pyroglutamic acid
XNITARIGEPLVLKCKGAPKKPPQRLEWKLNTGRTEAWKVLSPQGGGPWDSVARVLPNGSLFLPAVGIQDEGIFRCQAMNRNGKETKSNYRVRVYQIPGKPEIVDSASELTAGPSVFLFPPKPKDTLMISRTPEVTCVVVDVSHEDPEVKFNWYVDGVEVHNAKTKPREEQYNSTYRVVSVLTVLHQDWLNGKEYKCKVSNKALPAPIEKTISKAKGQPREPQVYTLPPSRDELTKNQVSLTCLVKGFYPSDIAVEWESNGQPENNYKTTPPVLDSDGSFFLYSKLTVDKSRWQQGNVFSCSVMHEALHNHYTQKSLSLSPGK

SEQ ID NO: 58 - protein, 438 aa, Artificial Sequence
  Synthetic polypeptide
QQITARIGEPLVLKCKGAPKKPPQRLEWKLNTGRTEAWKVLSPQGGGPWDSVARVLPNSSLFLPAVGIQDEGIFRCQAMNRNGKETKSNYRVRVYQIPGKPEIVDSASELTAGVPNKVGTCVSEGSYPAGTLSWHLDGKPLVPNEKGVSVKEQTRRHPETGLFTLQSELMVTPARGGDPRPTFSCSFSPGLPRHRALATAPIQPRVWEPVPLEEVQLVVEPEGGAVAPPSVFLFPPKPKDTLMISRTPEVTCVVVDVSHEDPEVKFNWYVDGVEVHNAKTKPREEQYNSTYRVVSVLTVLHQDWLNGKEYKCKVSNKALPAPIEKTISKAKGQPREPQVYTLPPSRDELTKNQVSLTCLVKGFYPSDIAVEWESNGQPENNYKTTPPVLDSDGSFFLYSKLTVDKSRWQQGNVFSCSVMHEALHNHYTQKSLSLSPGK

SEQ ID NO: 59 - protein, 437 aa, Artificial Sequence
  Synthetic polypeptide
QQITARIGEPLVLKCKGAPKKPPQRLEWKLNTGRTEAWKVLSPQGGGPWDSVARVLPNSSLFLPAVGIQDEGIFRCQAMNRNGKETKSNYRVRVYQIPGKPEIVDSASELTAGVPNKVGTCVSEGSYPAGTLSWHLDGKPLVPNEKGVSVKEQTRRHPETGLFTLQSELMVTPARGGDPRPTFSCSFSPGLPRHRALATAPIQPRVWEPVPLEEVQLVVEPEGGAVAPPSVFLFPPKPKDTLMISRTPEVTCVVVDVSHEDPEVKFNWYVDGVEVHNAKTKPREEQYNSTYRVVSVLTVLHQDWLNGKEYKCKVSNKALPAPIEKTISKAKGQPREPQVYTLPPSRDELTKNQVSLTCLVKGFYPSDIAVEWESNGQPENNYKTTPPVLDSDGSFFLYSKLTVDKSRWQQGNVFSCSVMHEALHNHYTQKSLSLSPG

SEQ ID NO: 60 - protein, 438 aa, Homo sapiens
  MISC_FEATURE (1)..(1): Xaa = pyroglutamic acid
XQITARIGEPLVLKCKGAPKKPPQRLEWKLNTGRTEAWKVLSPQGGGPWDSVARVLPNSSLFLPAVGIQDEGIFRCQAMNRNGKETKSNYRVRVYQIPGKPEIVDSASELTAGVPNKVGTCVSEGSYPAGTLSWHLDGKPLVPNEKGVSVKEQTRRHPETGLFTLQSELMVTPARGGDPRPTFSCSFSPGLPRHRALATAPIQPRVWEPVPLEEVQLVVEPEGGAVAPPSVFLFPPKPKDTLMISRTPEVTCVVVDVSHEDPEVKFNWYVDGVEVHNAKTKPREEQYNSTYRVVSVLTVLHQDWLNGKEYKCKVSNKALPAPIEKTISKAKGQPREPQVYTLPPSRDELTKNQVSLTCLVKGFYPSDIAVEWESNGQPENNYKTTPPVLDSDGSFFLYSKLTVDKSRWQQGNVFSCSVMHEALHNHYTQKSLSLSPGK

SEQ ID NO: 61 - protein, 437 aa, Artificial Sequence
  Synthetic polypeptide
QITARIGEPLVLKCKGAPKKPPQRLEWKLNTGRTEAWKVLSPQGGGPWDSVARVLPNSSLFLPAVGIQDEGIFRCQAMNRNGKETKSNYRVRVYQIPGKPEIVDSASELTAGVPNKVGTCVSEGSYPAGTLSWHLDGKPLVPNEKGVSVKEQTRRHPETGLFTLQSELMVTPARGGDPRPTFSCSFSPGLPRHRALATAPIQPRVWEPVPLEEVQLVVEPEGGAVAPPSVFLFPPKPKDTLMISRTPEVTCVVVDVSHEDPEVKFNWYVDGVEVHNAKTKPREEQYNSTYRVVSVLTVLHQDWLNGKEYKCKVSNKALPAPIEKTISKAKGQPREPQVYTLPPSRDELTKNQVSLTCLVKGFYPSDIAVEWESNGQPENNYKTTPPVLDSDGSFFLYSKLTVDKSRWQQGNVFSCSVMHEALHNHYTQKSLSLSPGK

SEQ ID NO: 62 - protein, 438 aa, Artificial Sequence
  Synthetic polypeptide
QQITARIGEPLVLKCKGAPKKPPQRLEWKLNTGRTEAWKVLSPQGGGPWDSVARVLPNGSLFLPAVGIQDEGIFRCQAMNRNGKETKSNYRVRVYQIPGKPEIVDSASELTAGVPNKVGTCVSEGSYPAGTLSWHLDGKPLVPNEKGVSVKEQTRRHPETGLFTLQSELMVTPARGGDPRPTFSCSFSPGLPRHRALRTAPIQPRVWEPVPLEEVQLVVEPEGGAVAPPSVFLFPPKPKDTLMISRTPEVTCVVVDVSHEDPEVKFNWYVDGVEVHNAKTKPREEQYNSTYRVVSVLTVLHQDWLNGKEYKCKVSNKALPAPIEKTISKAKGQPREPQVYTLPPSRDELTKNQVSLTCLVKGFYPSDIAVEWESNGQPENNYKTTPPVLDSDGSFFLYSKLTVDKSRWQQGNVFSCSVMHEALHNHYTQKSLSLSPGK

SEQ ID NO: 63 - protein, 438 aa, Artificial Sequence
  Synthetic polypeptide
QNITARIGEPLVLKCKGAPKKPPQRLEWKLNTGRTEAWKVLSPQGGGPWDSVARVLPQGSLFLPAVGIQDEGIFRCQAMNRNGKETKSNYRVRVYQIPGKPEIVDSASELTAGVPNKVGTCVSEGSYPAGTLSWHLDGKPLVPNEKGVSVKEQTRRHPETGLFTLQSELMVTPARGGDPRPTFSCSFSPGLPRHRALRTAPIQPRVWEPVPLEEVQLVVEPEGGAVAPPSVFLFPPKPKDTLMISRTPEVTCVVVDVSHEDPEVKFNWYVDGVEVHNAKTKPREEQYNSTYRVVSVLTVLHQDWLNGKEYKCKVSNKALPAPIEKTISKAKGQPREPQVYTLPPSRDELTKNQVSLTCLVKGFYPSDIAVEWESNGQPENNYKTTPPVLDSDGSFFLYSKLTVDKSRWQQGNVFSCSVMHEALHNHYTQKSLSLSPGK

SEQ ID NO: 64 - protein, 438 aa, Artificial Sequence
  Synthetic polypeptide
QQITARIGEPLVLKCKGAPKKPPQRLEWKLNTGRTEAWKVLSPQGGGPWDSVARVLPQGSLFLPAVGIQDEGIFRCQAMNRNGKETKSNYRVRVYQIPGKPEIVDSASELTAGVPNKVGTCVSEGSYPAGTLSWHLDGKPLVPNEKGVSVKEQTRRHPETGLFTLQSELMVTPARGGDPRPTFSCSFSPGLPRHRALRTAPIQPRVWEPVPLEEVQLVVEPEGGAVAPPSVFLFPPKPKDTLMISRTPEVTCVVVDVSHEDPEVKFNWYVDGVEVHNAKTKPREEQYNSTYRVVSVLTVLHQDWLNGKEYKCKVSNKALPAPIEKTISKAKGQPREPQVYTLPPSRDELTKNQVSLTCLVKGFYPSDIAVEWESNGQPENNYKTTPPVLDSDGSFFLYSKLTVDKSRWQQGNVFSCSVMHEALHNHYTQKSLSLSPGK

SEQ ID NO: 65 - protein, 438 aa, Artificial Sequence
  Synthetic polypeptide
QNITARIGEPLVLKCKGAPKKPPQRLEWKLNTGRTEAWKVLSPQGGGPWDSVARVLPNGSLFLPAVGIQDEGIFRCQAMNRNGKETKSNYRVRVYQIPGKPEIVDSASELTAGVPNKVGTCVSEGSYPAGTLSWHLDGKPLVPNEKGVSVKEQTRRHPETGLFTLQSELMVTPARGGDPRPTFSCSFSPGLPRHAALRTAPIQPRVWEPVPLEEVQLVVEPEGGAVAPPSVFLFPPKPKDTLMISRTPEVTCVVVDVSHEDPEVKFNWYVDGVEVHNAKTKPREEQYNSTYRVVSVLTVLHQDWLNGKEYKCKVSNKALPAPIEKTISKAKGQPREPQVYTLPPSRDELTKNQVSLTCLVKGFYPSDIAVEWESNGQPENNYKTTPPVLDSDGSFFLYSKLTVDKSRWQQGNVFSCSVMHEALHNHYTQKSLSLSPGK

SEQ ID NO: 66 - protein, 438 aa, Artificial Sequence
  Synthetic polypeptide
QNITARIGEPLVLKCKGAPKKPPQRLEWKLNTGRTEAWKVLSPQGGGPWDSVARVLPNGSLFLPAVGIQDEGIFRCQAMNRNGKETKSNYRVRVYQIPGKPEIVDSASELTAGVPNKVGTCVSEGSYPAGTLSWHLDGKPLVPNEKGVSVKEQTRRHPETGLFTLQSELMVTPARGGDPRPTFSCSFSPGLPRHKALRTAPIQPRVWEPVPLEEVQLVVEPEGGAVAPPSVFLFPPKPKDTLMISRTPEVTCVVVDVSHEDPEVKFNWYVDGVEVHNAKTKPREEQYNSTYRVVSVLTVLHQDWLNGKEYKCKVSNKALPAPIEKTISKAKGQPREPQVYTLPPSRDELTKNQVSLTCLVKGFYPSDIAVEWESNGQPENNYKTTPPVLDSDGSFFLYSKLTVDKSRWQQGNVFSCSVMHEALHNHYTQKSLSLSPGK

SEQ ID NO: 67 - protein, 438 aa, Artificial Sequence
  Synthetic polypeptide
QNITARIGEPLVLKCKGAPKKPPQRLEWKLNTGRTEAWKVLSPQGGGPWDSVARVLPNGSLFLPAVGIQDEGIFRCQAMNRNGKETKSNYRVRVYQIPGKPEIVDSASELTAGVPNKVGTCVSEGSYPAGTLSWHLDGKPLVPNEKGVSVKEQTRRHPETGLFTLQSELMVTPARGGDPRPTFSCSFSPGLPRHRALATAPIQPRVWEPVPLEEVQLVVEPEGGAVAPPSVFLFPPKPKDTLMISRTPEVTCVVVDVSHEDPEVKFNWYVDGVEVHNAKTKPREEQYNSTYRVVSVLTVLHQDWLNGKEYKCKVSNKALPAPIEKTISKAKGQPREPQVYTLPPSRDELTKNQVSLTCLVKGFYPSDIAVEWESNGQPENNYKTTPPVLDSDGSFFLYSKLTVDKSRWQQGNVFSCSVMHEALHNHYTQKSLSLSPGK

SEQ ID NO: 68 - protein, 438 aa, Artificial Sequence
  Synthetic polypeptide
QNITARIGEPLVLKCKGAPKKPPQRLEWKLNTGRTEAWKVLSPQGGGPWDSVARVLPNGSLFLPAVGIQDEGIFRCQAMNRNGKETKSNYRVRVYQIPGKPEIVDSASELTAGVPNKVGTCVSEGSYPAGTLSWHLDGKPLVPNEKGVSVKEQTRRHPETGLFTLQSELMVTPARGGDPRPTFSCSFSPGLPRHRALKTAPIQPRVWEPVPLEEVQLVVEPEGGAVAPPSVFLFPPKPKDTLMISRTPEVTCVVVDVSHEDPEVKFNWYVDGVEVHNAKTKPREEQYNSTYRVVSVLTVLHQDWLNGKEYKCKVSNKALPAPIEKTISKAKGQPREPQVYTLPPSRDELTKNQVSLTCLVKGFYPSDIAVEWESNGQPENNYKTTPPVLDSDGSFFLYSKLTVDKSRWQQGNVFSCSVMHEALHNHYTQKSLSLSPGK

SEQ ID NO: 69 - protein, 438 aa, Artificial Sequence
  Synthetic polypeptide
QNITARIGEPLVLKCKGAPKKPPQRLEWKLNTGRTEAWKVLSPQGGGPWDSVARVLPNGSLFLPAVGIQDEGIFRCQAMNRNGKETKSNYRVRVYQIPGKPEIVDSASELTAGVPNKVGTCVSEGSYPAGTLSWHLDGKPLVPNEKGVSVKEQTRRHPETGLFTLQSELMVTPARGGDPRPTFSCSFSPGLPRHRALHTAPIQPRVWEPVPLEEVQLVVEPEGGAVAPPSVFLFPPKPKDTLMISRTPEVTCVVVDVSHEDPEVKFNWYVDGVEVHNAKTKPREEQYNSTYRVVSVLTVLHQDWLNGKEYKCKVSNKALPAPIEKTISKAKGQPREPQVYTLPPSRDELTKNQVSLTCLVKGFYPSDIAVEWESNGQPENNYKTTPPVLDSDGSFFLYSKLTVDKSRWQQGNVFSCSVMHEALHNHYTQKSLSLSPGK

SEQ ID NO: 70 - protein, 438 aa, Artificial Sequence
  Synthetic polypeptide
QNITARIGEPLVLKCKGAPKKPPQRLEWKLNTGRTEAWKVLSPQGGGPWDSVARVLPNGSLFLPAVGIQDEGIFRCQAMNRNGKETKSNYRVRVYQIPGKPEIVDSASELTAGVPNKVGTCVSEGSYPAGTLSWHLDGKPLVPNEKGVSVKEQTRRHPETGLFTLQSELMVTPARGGDPRPTFSCSFSPGLPRHRALTTAPIQPRVWEPVPLEEVQLVVEPEGGAVAPPSVFLFPPKPKDTLMISRTPEVTCVVVDVSHEDPEVKFNWYVDGVEVHNAKTKPREEQYNSTYRVVSVLTVLHQDWLNGKEYKCKVSNKALPAPIEKTISKAKGQPREPQVYTLPPSRDELTKNQVSLTCLVKGFYPSDIAVEWESNGQPENNYKTTPPVLDSDGSFFLYSKLTVDKSRWQQGNVFSCSVMHEALHNHYTQKSLSLSPGK

SEQ ID NO: 71 - protein, 438 aa, Artificial Sequence
  Synthetic polypeptide
QQITARIGEPLVLKCKGAPKKPPQRLEWKLNTGRTEAWKVLSPQGGGPWDSVARVLPNGSLFLPAVGIQDEGIFRCQAMNRNGKETKSNYRVRVYQIPGKPEIVDSASELTAGVPNKVGTCVSEGSYPAGTLSWHLDGKPLVPNEKGVSVKEQTRRHPETGLFTLQSELMVTPARGGDPRPTFSCSFSPGLPRHRALATAPIQPRVWEPVPLEEVQLVVEPEGGAVAPPSVFLFPPKPKDTLMISRTPEVTCVVVDVSHEDPEVKFNWYVDGVEVHNAKTKPREEQYNSTYRVVSVLTVLHQDWLNGKEYKCKVSNKALPAPIEKTISKAKGQPREPQVYTLPPSRDELTKNQVSLTCLVKGFYPSDIAVEWESNGQPENNYKTTPPVLDSDGSFFLYSKLTVDKSRWQQGNVFSCSVMHEALHNHYTQKSLSLSPGK

SEQ ID NO: 72 - protein, 438 aa, Artificial Sequence
  Synthetic polypeptide
QNITARIGEPLVLKCKGAPKKPPQRLEWKLNTGRTEAWKVLSPQGGGPWDSVARVLPQGSLFLPAVGIQDEGIFRCQAMNRNGKETKSNYRVRVYQIPGKPEIVDSASELTAGVPNKVGTCVSEGSYPAGTLSWHLDGKPLVPNEKGVSVKEQTRRHPETGLFTLQSELMVTPARGGDPRPTFSCSFSPGLPRHRALATAPIQPRVWEPVPLEEVQLVVEPEGGAVAPPSVFLFPPKPKDTLMISRTPEVTCVVVDVSHEDPEVKFNWYVDGVEVHNAKTKPREEQYNSTYRVVSVLTVLHQDWLNGKEYKCKVSNKALPAPIEKTISKAKGQPREPQVYTLPPSRDELTKNQVSLTCLVKGFYPSDIAVEWESNGQPENNYKTTPPVLDSDGSFFLYSKLTVDKSRWQQGNVFSCSVMHEALHNHYTQKSLSLSPGK

SEQ ID NO: 73 - protein, 438 aa, Artificial Sequence
  Synthetic polypeptide
QQITARIGEPLVLKCKGAPKKPPQRLEWKLNTGRTEAWKVLSPQGGGPWDSVARVLPQGSLFLPAVGIQDEGIFRCQAMNRNGKETKSNYRVRVYQIPGKPEIVDSASELTAGVPNKVGTCVSEGSYPAGTLSWHLDGKPLVPNEKGVSVKEQTRRHPETGLFTLQSELMVTPARGGDPRPTFSCSFSPGLPRHRALATAPIQPRVWEPVPLEEVQLVVEPEGGAVAPPSVFLFPPKPKDTLMISRTPEVTCVVVDVSHEDPEVKFNWYVDGVEVHNAKTKPREEQYNSTYRVVSVLTVLHQDWLNGKEYKCKVSNKALPAPIEKTISKAKGQPREPQVYTLPPSRDELTKNQVSLTCLVKGFYPSDIAVEWESNGQPENNYKTTPPVLDSDGSFFLYSKLTVDKSRWQQGNVFSCSVMHEALHNHYTQKSLSLSPGK

SEQ ID NO: 74 - protein, 438 aa, Artificial Sequence
  Synthetic polypeptide
QNITARIGEPLVLKCKGAPKKPPQRLEWKLNTGRTEAWKVLSPQGGGPWDSVARVLPNGSLFLPAVGIQDEGIFRCQAMNRNGKETKSNYRVRVYQIPGKPEIVDSASELTAGVPNKVGTCVSEGSYPAGTLSWHLDGKPLVPNEKGVSVKEQTRRHPETGLFTLQSELMVTPARGGDPRPTFSCSFSPGLPRHRALRTAPIQPRVWEPVPLEEVQLVVEPEGGAVAPPSVFLFPPKPKDTLMISRTPEVTCVVVDVSHEDPEVKFNWYVDGVEVHNAKTKPREEQYQSTYRVVSVLTVLHQDWLNGKEYKCKVSNKALPAPIEKTISKAKGQPREPQVYTLPPSRDELTKNQVSLTCLVKGFYPSDIAVEWESNGQPENNYKTTPPVLDSDGSFFLYSKLTVDKSRWQQGNVFSCSVMHEALHNHYTQKSLSLSPGK

SEQ ID NO: 75 - protein, 438 aa, Artificial Sequence
  Synthetic polypeptide
QQITARIGEPLVLKCKGAPKKPPQRLEWKLNTGRTEAWKVLSPQGGGPWDSVARVLPNGSLFLPAVGIQDEGIFRCQAMNRNGKETKSNYRVRVYQIPGKPEIVDSASELTAGVPNKVGTCVSEGSYPAGTLSWHLDGKPLVPNEKGVSVKEQTRRHPETGLFTLQSELMVTPARGGDPRPTFSCSFSPGLPRHRALRTAPIQPRVWEPVPLEEVQLVVEPEGGAVAPPSVFLFPPKPKDTLMISRTPEVTCVVVDVSHEDPEVKFNWYVDGVEVHNAKTKPREEQYQSTYRVVSVLTVLHQDWLNGKEYKCKVSNKALPAPIEKTISKAKGQPREPQVYTLPPSRDELTKNQVSLTCLVKGFYPSDIAVEWESNGQPENNYKTTPPVLDSDGSFFLYSKLTVDKSRWQQGNVFSCSVMHEALHNHYTQKSLSLSPGK

SEQ ID NO: 76 - protein, 438 aa, Artificial Sequence
  Synthetic polypeptide
QNITARIGEPLVLKCKGAPKKPPQRLEWKLNTGRTEAWKVLSPQGGGPWDSVARVLPQGSLFLPAVGIQDEGIFRCQAMNRNGKETKSNYRVRVYQIPGKPEIVDSASELTAGVPNKVGTCVSEGSYPAGTLSWHLDGKPLVPNEKGVSVKEQTRRHPETGLFTLQSELMVTPARGGDPRPTFSCSFSPGLPRHRALRTAPIQPRVWEPVPLEEVQLVVEPEGGAVAPPSVFLFPPKPKDTLMISRTPEVTCVVVDVSHEDPEVKFNWYVDGVEVHNAKTKPREEQYQSTYRVVSVLTVLHQDWLNGKEYKCKVSNKALPAPIEKTISKAKGQPREPQVYTLPPSRDELTKNQVSLTCLVKGFYPSDIAVEWESNGQPENNYKTTPPVLDSDGSFFLYSKLTVDKSRWQQGNVFSCSVMHEALHNHYTQKSLSLSPGK

SEQ ID NO: 77 - protein, 438 aa, Artificial Sequence
  Synthetic polypeptide
QQITARIGEPLVLKCKGAPKKPPQRLEWKLNTGRTEAWKVLSPQGGGPWDSVARVLPQGSLFLPAVGIQDEGIFRCQAMNRNGKETKSNYRVRVYQIPGKPEIVDSASELTAGVPNKVGTCVSEGSYPAGTLSWHLDGKPLVPNEKGVSVKEQTRRHPETGLFTLQSELMVTPARGGDPRPTFSCSFSPGLPRHRALRTAPIQPRVWEPVPLEEVQLVVEPEGGAVAPPSVFLFPPKPKDTLMISRTPEVTCVVVDVSHEDPEVKFNWYVDGVEVHNAKTKPREEQYQSTYRVVSVLTVLHQDWLNGKEYKCKVSNKALPAPIEKTISKAKGQPREPQVYTLPPSRDELTKNQVSLTCLVKGFYPSDIAVEWESNGQPENNYKTTPPVLDSDGSFFLYSKLTVDKSRWQQGNVFSCSVMHEALHNHYTQKSLSLSPGK

SEQ ID NO: 78 - protein, 438 aa, Artificial Sequence
  Synthetic polypeptide
QQITARIGEPLVLKCKGAPKKPPQRLEWKLNTGRTEAWKVLSPQGGGPWDSVARVLPNGSLFLPAVGIQDEGIFRCQAMNRNGKETKSNYRVRVYQIPGKPEIVDSASELTAGVPNKVGTCVSEGSYPAGTLSWHLDGKPLVPNEKGVSVKEQTRRHPETGLFTLQSELMVTPARGGDPRPTFSCSFSPGLPRHRALATAPIQPRVWEPVPLEEVQLVVEPEGGAVAPPSVFLFPPKPKDTLMISRTPEVTCVVVDVSHEDPEVKFNWYVDGVEVHNAKTKPREEQYQSTYRVVSVLTVLHQDWLNGKEYKCKVSNKALPAPIEKTISKAKGQPREPQVYTLPPSRDELTKNQVSLTCLVKGFYPSDIAVEWESNGQPENNYKTTPPVLDSDGSFFLYSKLTVDKSRWQQGNVFSCSVMHEALHNHYTQKSLSLSPGK

SEQ ID NO: 79 - protein, 438 aa, Artificial Sequence
  Synthetic polypeptide
QNITARIGEPLVLKCKGAPKKPPQRLEWKLNTGRTEAWKVLSPQGGGPWDSVARVLPQGSLFLPAVGIQDEGIFRCQAMNRNGKETKSNYRVRVYQIPGKPEIVDSASELTAGVPNKVGTCVSEGSYPAGTLSWHLDGKPLVPNEKGVSVKEQTRRHPETGLFTLQSELMVTPARGGDPRPTFSCSFSPGLPRHRALATAPIQPRVWEPVPLEEVQLVVEPEGGAVAPPSVFLFPPKPKDTLMISRTPEVTCVVVDVSHEDPEVKFNWYVDGVEVHNAKTKPREEQYQSTYRVVSVLTVLHQDWLNGKEYKCKVSNKALPAPIEKTISKAKGQPREPQVYTLPPSRDELTKNQVSLTCLVKGFYPSDIAVEWESNGQPENNYKTTPPVLDSDGSFFLYSKLTVDKSRWQQGNVFSCSVMHEALHNHYTQKSLSLSPGK

SEQ ID NO: 80 - protein, 438 aa, Artificial Sequence
  Synthetic polypeptide
QQITARIGEPLVLKCKGAPKKPPQRLEWKLNTGRTEAWKVLSPQGGGPWDSVARVLPQGSLFLPAVGIQDEGIFRCQAMNRNGKETKSNYRVRVYQIPGKPEIVDSASELTAGVPNKVGTCVSEGSYPAGTLSWHLDGKPLVPNEKGVSVKEQTRRHPETGLFTLQSELMVTPARGGDPRPTFSCSFSPGLPRHRALATAPIQPRVWEPVPLEEVQLVVEPEGGAVAPPSVFLFPPKPKDTLMISRTPEVTCVVVDVSHEDPEVKFNWYVDGVEVHNAKTKPREEQYQSTYRVVSVLTVLHQDWLNGKEYKCKVSNKALPAPIEKTISKAKGQPREPQVYTLPPSRDELTKNQVSLTCLVKGFYPSDIAVEWESNGQPENNYKTTPPVLDSDGSFFLYSKLTVDKSRWQQGNVFSCSVMHEALHNHYTQKSLSLSPGK

SEQ ID NO: 81 - protein, 438 aa, Artificial Sequence
  Synthetic polypeptide
QNITARIGEPLVLKCKGAPKKPPQRLEWKLNTGRTEAWKVLSPQGGGPWDSVARVLPNSSLFLPAVGIQDEGIFRCQAMNRNGKETKSNYRVRVYQIPGKPEIVDSASELTAGVPNKVGTCVSEGSYPAGTLSWHLDGKPLVPNEKGVSVKEQTRRHPETGLFTLQSELMVTPARGGDPRPTFSCSFSPGLPRHRALATAPIQPRVWEPVPLEEVQLVVEPEGGAVAPPSVFLFPPKPKDTLMISRTPEVTCVVVDVSHEDPEVKFNWYVDGVEVHNAKTKPREEQYNSTYRVVSVLTVLHQDWLNGKEYKCKVSNKALPAPIEKTISKAKGQPREPQVYTLPPSRDELTKNQVSLTCLVKGFYPSDIAVEWESNGQPENNYKTTPPVLDSDGSFFLYSKLTVDKSRWQQGNVFSCSVMHEALHNHYTQKSLSLSPGK

SEQ ID NO: 82 - protein, 436 aa, Artificial Sequence
  Synthetic polypeptide
QITARIGEPLVLKCKGAPKKPPQRLEWKLNTGRTEAWKVLSPQGGGPWDSVARVLPNSSLFLPAVGIQDEGIFRCQAMNRNGKETKSNYRVRVYQIPGKPEIVDSASELTAGVPNKVGTCVSEGSYPAGTLSWHLDGKPLVPNEKGVSVKEQTRRHPETGLFTLQSELMVTPARGGDPRPTFSCSFSPGLPRHRALATAPIQPRVWEPVPLEEVQLVVEPEGGAVAPPSVFLFPPKPKDTLMISRTPEVTCVVVDVSHEDPEVKFNWYVDGVEVHNAKTKPREEQYNSTYRVVSVLTVLHQDWLNGKEYKCKVSNKALPAPIEKTISKAKGQPREPQVYTLPPSRDELTKNQVSLTCLVKGFYPSDIAVEWESNGQPENNYKTTPPVLDSDGSFFLYSKLTVDKSRWQQGNVFSCSVMHEALHNHYTQKSLSLSPG

SEQ ID NO: 83 - protein, 23 aa, Homo sapiens
MAAGTAVGAWVLVLSLWGAVVGA

SEQ ID NO: 84 - DNA, 69 bp, Homo sapiens
atggcagccggaacagcagttggagcctgggtgctggtcctcagtctgtggggggcagtagtaggtgct

SEQ ID NO: 85 - DNA, 69 bp, Artificial Sequence
  Synthetic polynucleotide
atggcagccggaacagcagttggagcctgggtgctggtcctcagtctgtggggcgctgtggtgggcgcc

SEQ ID NO: 86 - protein, 209 aa, Homo sapiens
PSVFLFPPKPKDTLMISRTPEVTCVVVDVSHEDPEVKFNWYVDGVEVHNAKTKPREEQYNSTYRVVSVLTVLHQDWLNGKEYKCKVSNKALPAPIEKTISKAKGQPREPQVYTLPPSRDELTKNQVSLTCLVKGFYPSDIAVEWESNGQPENNYKTTPPVLDSDGSFFLYSKLTVDKSRWQQGNVFSCSVMHEALHNHYTQKSLSLSPG

SEQ ID NO: 87 - protein, 219 aa, Homo sapiens
PCPAPELLGGPSVFLFPPKPKDTLMISRTPEVTCVVVDVSHEDPEVKFNWYVDGVEVHNAKTKPREEQYNSTYRVVSVLTVLHQDWLNGKEYKCKVSNKALPAPIEKTISKAKGQPREPQVYTLPPSRDELTKNQVSLTCLVKGFYPSDIAVEWESNGQPENNYKTTPPVLDSDGSFFLYSKLTVDKSRWQQGNVFSCSVMHEALHNHYTQKSLSLSPG

SEQ ID NO: 88 - protein, 208 aa, Homo sapiens
SVFLFPPKPKDTLMISRTPEVTCVVVDVSHEDPEVKFNWYVDGVEVHNAKTKPREEQYNSTYRVVSVLTVLHQDWLNGKEYKCKVSNKALPAPIEKTISKAKGQPREPQVYTLPPSRDELTKNQVSLTCLVKGFYPSDIAVEWESNGQPENNYKTTPPVLDSDGSFFLYSKLTVDKSRWQQGNVFSCSVMHEALHNHYTQKSLSLSPG

SEQ ID NO: 89 - protein, 208 aa, Artificial Sequence
  Synthetic polypeptide
SVFLFPPKPKDTLMISRTPEVTCVVVDVSHEDPEVKFNWYVDGVEVHNAKTKPREEQYQSTYRVVSVLTVLHQDWLNGKEYKCKVSNKALPAPIEKTISKAKGQPREPQVYTLPPSRDELTKNQVSLTCLVKGFYPSDIAVEWESNGQPENNYKTTPPVLDSDGSFFLYSKLTVDKSRWQQGNVFSCSVMHEALHNHYTQKSLSLSPG

SEQ ID NO: 90 - protein, 103 aa, Homo sapiens
PSVFLFPPKPKDTLMISRTPEVTCVVVDVSHEDPEVKFNWYVDGVEVHNAKTKPREEQYNSTYRVVSVLTVLHQDWLNGKEYKCKVSNKALPAPIEKTISKAK

SEQ ID NO: 91 - protein, 102 aa, Homo sapiens
SVFLFPPKPKDTLMISRTPEVTCVVVDVSHEDPEVKFNWYVDGVEVHNAKTKPREEQYNSTYRVVSVLTVLHQDWLNGKEYKCKVSNKALPAPIEKTISKAK

SEQ ID NO: 92 - protein, 437 aa, Artificial Sequence
  Synthetic polypeptide
QQITARIGEPLVLKCKGAPKKPPQRLEWKLNTGRTEAWKVLSPQGGGPWDSVARVLPNGSLFLPAVGIQDEGIFRCQAMNRNGKETKSNYRVRVYQIPGKPEIVDSASELTAGVPNKVGTCVSEGSYPAGTLSWHLDGKPLVPNEKGVSVKEQTRRHPETGLFTLQSELMVTPARGGDPRPTFSCSFSPGLPRHRALRTAPIQPRVWEPVPLEEVQLVVEPEGGAVAPPSVFLFPPKPKDTLMISRTPEVTCVVVDVSHEDPEVKFNWYVDGVEVHNAKTKPREEQYNSTYRVVSVLTVLHQDWLNGKEYKCKVSNKALPAPIEKTISKAKGQPREPQVYTLPPSRDELTKNQVSLTCLVKGFYPSDIAVEWESNGQPENNYKTTPPVLDSDGSFFLYSKLTVDKSRWQQGNVFSCSVMHEALHNHYTQKSLSLSPG

SEQ ID NO: 93 - protein, 437 aa, Artificial Sequence
  Synthetic polypeptide
QNITARIGEPLVLKCKGAPKKPPQRLEWKLNTGRTEAWKVLSPQGGGPWDSVARVLPQGSLFLPAVGIQDEGIFRCQAMNRNGKETKSNYRVRVYQIPGKPEIVDSASELTAGVPNKVGTCVSEGSYPAGTLSWHLDGKPLVPNEKGVSVKEQTRRHPETGLFTLQSELMVTPARGGDPRPTFSCSFSPGLPRHRALRTAPIQPRVWEPVPLEEVQLVVEPEGGAVAPPSVFLFPPKPKDTLMISRTPEVTCVVVDVSHEDPEVKFNWYVDGVEVHNAKTKPREEQYNSTYRVVSVLTVLHQDWLNGKEYKCKVSNKALPAPIEKTISKAKGQPREPQVYTLPPSRDELTKNQVSLTCLVKGFYPSDIAVEWESNGQPENNYKTTPPVLDSDGSFFLYSKLTVDKSRWQQGNVFSCSVMHEALHNHYTQKSLSLSPG

SEQ ID NO: 94 - protein, 437 aa, Artificial Sequence
  Synthetic polypeptide
QQITARIGEPLVLKCKGAPKKPPQRLEWKLNTGRTEAWKVLSPQGGGPWDSVARVLPQGSLFLPAVGIQDEGIFRCQAMNRNGKETKSNYRVRVYQIPGKPEIVDSASELTAGVPNKVGTCVSEGSYPAGTLSWHLDGKPLVPNEKGVSVKEQTRRHPETGLFTLQSELMVTPARGGDPRPTFSCSFSPGLPRHRALRTAPIQPRVWEPVPLEEVQLVVEPEGGAVAPPSVFLFPPKPKDTLMISRTPEVTCVVVDVSHEDPEVKFNWYVDGVEVHNAKTKPREEQYNSTYRVVSVLTVLHQDWLNGKEYKCKVSNKALPAPIEKTISKAKGQPREPQVYTLPPSRDELTKNQVSLTCLVKGFYPSDIAVEWESNGQPENNYKTTPPVLDSDGSFFLYSKLTVDKSRWQQGNVFSCSVMHEALHNHYTQKSLSLSPG

SEQ ID NO: 95 - protein, 437 aa, Artificial Sequence
  Synthetic polypeptide
QNITARIGEPLVLKCKGAPKKPPQRLEWKLNTGRTEAWKVLSPQGGGPWDSVARVLPNGSLFLPAVGIQDEGIFRCQAMNRNGKETKSNYRVRVYQIPGKPEIVDSASELTAGVPNKVGTCVSEGSYPAGTLSWHLDGKPLVPNEKGVSVKEQTRRHPETGLFTLQSELMVTPARGGDPRPTFSCSFSPGLPRHAALRTAPIQPRVWEPVPLEEVQLVVEPEGGAVAPPSVFLFPPKPKDTLMISRTPEVTCVVVDVSHEDPEVKFNWYVDGVEVHNAKTKPREEQYNSTYRVVSVLTVLHQDWLNGKEYKCKVSNKALPAPIEKTISKAKGQPREPQVYTLPPSRDELTKNQVSLTCLVKGFYPSDIAVEWESNGQPENNYKTTPPVLDSDGSFFLYSKLTVDKSRWQQGNVFSCSVMHEALHNHYTQKSLSLSPG

SEQ ID NO: 96 - protein, 437 aa, Artificial Sequence
  Synthetic polypeptide
QNITARIGEPLVLKCKGAPKKPPQRLEWKLNTGRTEAWKVLSPQGGGPWDSVARVLPNGSLFLPAVGIQDEGIFRCQAMNRNGKETKSNYRVRVYQIPGKPEIVDSASELTAGVPNKVGTCVSEGSYPAGTLSWHLDGKPLVPNEKGVSVKEQTRRHPETGLFTLQSELMVTPARGGDPRPTFSCSFSPGLPRHKALRTAPIQPRVWEPVPLEEVQLVVEPEGGAVAPPSVFLFPPKPKDTLMISRTPEVTCVVVDVSHEDPEVKFNWYVDGVEVHNAKTKPREEQYNSTYRVVSVLTVLHQDWLNGKEYKCKVSNKALPAPIEKTISKAKGQPREPQVYTLPPSRDELTKNQVSLTCLVKGFYPSDIAVEWESNGQPENNYKTTPPVLDSDGSFFLYSKLTVDKSRWQQGNVFSCSVMHEALHNHYTQKSLSLSPG

SEQ ID NO: 97 - protein, 437 aa, Artificial Sequence
  Synthetic polypeptide
QNITARIGEPLVLKCKGAPKKPPQRLEWKLNTGRTEAWKVLSPQGGGPWDSVARVLPNGSLFLPAVGIQDEGIFRCQAMNRNGKETKSNYRVRVYQIPGKPEIVDSASELTAGVPNKVGTCVSEGSYPAGTLSWHLDGKPLVPNEKGVSVKEQTRRHPETGLFTLQSELMVTPARGGDPRPTFSCSFSPGLPRHRALATAPIQPRVWEPVPLEEVQLVVEPEGGAVAPPSVFLFPPKPKDTLMISRTPEVTCVVVDVSHEDPEVKFNWYVDGVEVHNAKTKPREEQYNSTYRVVSVLTVLHQDWLNGKEYKCKVSNKALPAPIEKTISKAKGQPREPQVYTLPPSRDELTKNQVSLTCLVKGFYPSDIAVEWESNGQPENNYKTTPPVLDSDGSFFLYSKLTVDKSRWQQGNVFSCSVMHEALHNHYTQKSLSLSPG

SEQ ID NO: 98 - protein, 437 aa, Artificial Sequence
  Synthetic polypeptide
QNITARIGEPLVLKCKGAPKKPPQRLEWKLNTGRTEAWKVLSPQGGGPWDSVARVLPNGSLFLPAVGIQDEGIFRCQAMNRNGKETKSNYRVRVYQIPGKPEIVDSASELTAGVPNKVGTCVSEGSYPAGTLSWHLDGKPLVPNEKGVSVKEQTRRHPETGLFTLQSELMVTPARGGDPRPTFSCSFSPGLPRHRALKTAPIQPRVWEPVPLEEVQLVVEPEGGAVAPPSVFLFPPKPKDTLMISRTPEVTCVVVDVSHEDPEVKFNWYVDGVEVHNAKTKPREEQYNSTYRVVSVLTVLHQDWLNGKEYKCKVSNKALPAPIEKTISKAKGQPREPQVYTLPPSRDELTKNQVSLTCLVKGFYPSDIAVEWESNGQPENNYKTTPPVLDSDGSFFLYSKLTVDKSRWQQGNVFSCSVMHEALHNHYTQKSLSLSPG

SEQ ID NO: 99 - protein, 437 aa, Artificial Sequence
  Synthetic polypeptide
QNITARIGEPLVLKCKGAPKKPPQRLEWKLNTGRTEAWKVLSPQGGGPWDSVARVLPNGSLFLPAVGIQDEGIFRCQAMNRNGKETKSNYRVRVYQIPGKPEIVDSASELTAGVPNKVGTCVSEGSYPAGTLSWHLDGKPLVPNEKGVSVKEQTRRHPETGLFTLQSELMVTPARGGDPRPTFSCSFSPGLPRHRALHTAPIQPRVWEPVPLEEVQLVVEPEGGAVAPPSVFLFPPKPKDTLMISRTPEVTCVVVDVSHEDPEVKFNWYVDGVEVHNAKTKPREEQYNSTYRVVSVLTVLHQDWLNGKEYKCKVSNKALPAPIEKTISKAKGQPREPQVYTLPPSRDELTKNQVSLTCLVKGFYPSDIAVEWESNGQPENNYKTTPPVLDSDGSFFLYSKLTVDKSRWQQGNVFSCSVMHEALHNHYTQKSLSLSPG

SEQ ID NO: 100 - protein, 437 aa, Artificial Sequence
  Synthetic polypeptide
QNITARIGEPLVLKCKGAPKKPPQRLEWKLNTGRTEAWKVLSPQGGGPWDSVARVLPNGSLFLPAVGIQDEGIFRCQAMNRNGKETKSNYRVRVYQIPGKPEIVDSASELTAGVPNKVGTCVSEGSYPAGTLSWHLDGKPLVPNEKGVSVKEQTRRHPETGLFTLQSELMVTPARGGDPRPTFSCSFSPGLPRHRALTTAPIQPRVWEPVPLEEVQLVVEPEGGAVAPPSVFLFPPKPKDTLMISRTPEVTCVVVDVSHEDPEVKFNWYVDGVEVHNAKTKPREEQYNSTYRVVSVLTVLHQDWLNGKEYKCKVSNKALPAPIEKTISKAKGQPREPQVYTLPPSRDELTKNQVSLTCLVKGFYPSDIAVEWESNGQPENNYKTTPPVLDSDGSFFLYSKLTVDKSRWQQGNVFSCSVMHEALHNHYTQKSLSLSPG

SEQ ID NO: 101 - protein, 437 aa, Artificial Sequence
  Synthetic polypeptide
QQITARIGEPLVLKCKGAPKKPPQRLEWKLNTGRTEAWKVLSPQGGGPWDSVARVLPNGSLFLPAVGIQDEGIFRCQAMNRNGKETKSNYRVRVYQIPGKPEIVDSASELTAGVPNKVGTCVSEGSYPAGTLSWHLDGKPLVPNEKGVSVKEQTRRHPETGLFTLQSELMVTPARGGDPRPTFSCSFSPGLPRHRALATAPIQPRVWEPVPLEEVQLVVEPEGGAVAPPSVFLFPPKPKDTLMISRTPEVTCVVVDVSHEDPEVKFNWYVDGVEVHNAKTKPREEQYNSTYRVVSVLTVLHQDWLNGKEYKCKVSNKALPAPIEKTISKAKGQPREPQVYTLPPSRDELTKNQVSLTCLVKGFYPSDIAVEWESNGQPENNYKTTPPVLDSDGSFFLYSKLTVDKSRWQQGNVFSCSVMHEALHNHYTQKSLSLSPG

SEQ ID NO: 102 - protein, 437 aa, Artificial Sequence
  Synthetic polypeptide
QNITARIGEPLVLKCKGAPKKPPQRLEWKLNTGRTEAWKVLSPQGGGPWDSVARVLPQGSLFLPAVGIQDEGIFRCQAMNRNGKETKSNYRVRVYQIPGKPEIVDSASELTAGVPNKVGTCVSEGSYPAGTLSWHLDGKPLVPNEKGVSVKEQTRRHPETGLFTLQSELMVTPARGGDPRPTFSCSFSPGLPRHRALATAPIQPRVWEPVPLEEVQLVVEPEGGAVAPPSVFLFPPKPKDTLMISRTPEVTCVVVDVSHEDPEVKFNWYVDGVEVHNAKTKPREEQYNSTYRVVSVLTVLHQDWLNGKEYKCKVSNKALPAPIEKTISKAKGQPREPQVYTLPPSRDELTKNQVSLTCLVKGFYPSDIAVEWESNGQPENNYKTTPPVLDSDGSFFLYSKLTVDKSRWQQGNVFSCSVMHEALHNHYTQKSLSLSPG

SEQ ID NO: 103 - protein, 437 aa, Artificial Sequence
  Synthetic polypeptide
QQITARIGEPLVLKCKGAPKKPPQRLEWKLNTGRTEAWKVLSPQGGGPWDSVARVLPQGSLFLPAVGIQDEGIFRCQAMNRNGKETKSNYRVRVYQIPGKPEIVDSASELTAGVPNKVGTCVSEGSYPAGTLSWHLDGKPLVPNEKGVSVKEQTRRHPETGLFTLQSELMVTPARGGDPRPTFSCSFSPGLPRHRALATAPIQPRVWEPVPLEEVQLVVEPEGGAVAPPSVFLFPPKPKDTLMISRTPEVTCVVVDVSHEDPEVKFNWYVDGVEVHNAKTKPREEQYNSTYRVVSVLTVLHQDWLNGKEYKCKVSNKALPAPIEKTISKAKGQPREPQVYTLPPSRDELTKNQVSLTCLVKGFYPSDIAVEWESNGQPENNYKTTPPVLDSDGSFFLYSKLTVDKSRWQQGNVFSCSVMHEALHNHYTQKSLSLSPG

SEQ ID NO: 104 - protein, 437 aa, Artificial Sequence
  Synthetic polypeptide
QNITARIGEPLVLKCKGAPKKPPQRLEWKLNTGRTEAWKVLSPQGGGPWDSVARVLPNGSLFLPAVGIQDEGIFRCQAMNRNGKETKSNYRVRVYQIPGKPEIVDSASELTAGVPNKVGTCVSEGSYPAGTLSWHLDGKPLVPNEKGVSVKEQTRRHPETGLFTLQSELMVTPARGGDPRPTFSCSFSPGLPRHRALRTAPIQPRVWEPVPLEEVQLVVEPEGGAVAPPSVFLFPPKPKDTLMISRTPEVTCVVVDVSHEDPEVKFNWYVDGVEVHNAKTKPREEQYQSTYRVVSVLTVLHQDWLNGKEYKCKVSNKALPAPIEKTISKAKGQPREPQVYTLPPSRDELTKNQVSLTCLVKGFYPSDIAVEWESNGQPENNYKTTPPVLDSDGSFFLYSKLTVDKSRWQQGNVFSCSVMHEALHNHYTQKSLSLSPG

SEQ ID NO: 105 - protein, 437 aa, Artificial Sequence
  Synthetic polypeptide
QQITARIGEPLVLKCKGAPKKPPQRLEWKLNTGRTEAWKVLSPQGGGPWDSVARVLPNGSLFLPAVGIQDEGIFRCQAMNRNGKETKSNYRVRVYQIPGKPEIVDSASELTAGVPNKVGTCVSEGSYPAGTLSWHLDGKPLVPNEKGVSVKEQTRRHPETGLFTLQSELMVTPARGGDPRPTFSCSFSPGLPRHRALRTAPIQPRVWEPVPLEEVQLVVEPEGGAVAPPSVFLFPPKPKDTLMISRTPEVTCVVVDVSHEDPEVKFNWYVDGVEVHNAKTKPREEQYQSTYRVVSVLTVLHQDWLNGKEYKCKVSNKALPAPIEKTISKAKGQPREPQVYTLPPSRDELTKNQVSLTCLVKGFYPSDIAVEWESNGQPENNYKTTPPVLDSDGSFFLYSKLTVDKSRWQQGNVFSCSVMHEALHNHYTQKSLSLSPG

SEQ ID NO: 106 - protein, 437 aa, Artificial Sequence
  Synthetic polypeptide
QNITARIGEPLVLKCKGAPKKPPQRLEWKLNTGRTEAWKVLSPQGGGPWDSVARVLPQGSLFLPAVGIQDEGIFRCQAMNRNGKETKSNYRVRVYQIPGKPEIVDSASELTAGVPNKVGTCVSEGSYPAGTLSWHLDGKPLVPNEKGVSVKEQTRRHPETGLFTLQSELMVTPARGGDPRPTFSCSFSPGLPRHRALRTAPIQPRVWEPVPLEEVQLVVEPEGGAVAPPSVFLFPPKPKDTLMISRTPEVTCVVVDVSHEDPEVKFNWYVDGVEVHNAKTKPREEQYQSTYRVVSVLTVLHQDWLNGKEYKCKVSNKALPAPIEKTISKAKGQPREPQVYTLPPSRDELTKNQVSLTCLVKGFYPSDIAVEWESNGQPENNYKTTPPVLDSDGSFFLYSKLTVDKSRWQQGNVFSCSVMHEALHNHYTQKSLSLSPG

SEQ ID NO: 107 - protein, 437 aa, Artificial Sequence
  Synthetic polypeptide
QQITARIGEPLVLKCKGAPKKPPQRLEWKLNTGRTEAWKVLSPQGGGPWDSVARVLPQGSLFLPAVGIQDEGIFRCQAMNRNGKETKSNYRVRVYQIPGKPEIVDSASELTAGVPNKVGTCVSEGSYPAGTLSWHLDGKPLVPNEKGVSVKEQTRRHPETGLFTLQSELMVTPARGGDPRPTFSCSFSPGLPRHRALRTAPIQPRVWEPVPLEEVQLVVEPEGGAVAPPSVFLFPPKPKDTLMISRTPEVTCVVVDVSHEDPEVKFNWYVDGVEVHNAKTKPREEQYQSTYRVVSVLTVLHQDWLNGKEYKCKVSNKALPAPIEKTISKAKGQPREPQVYTLPPSRDELTKNQVSLTCLVKGFYPSDIAVEWESNGQPENNYKTTPPVLDSDGSFFLYSKLTVDKSRWQQGNVFSCSVMHEALHNHYTQKSLSLSPG

SEQ ID NO: 108 - protein, 437 aa, Artificial Sequence
  Synthetic polypeptide
QQITARIGEPLVLKCKGAPKKPPQRLEWKLNTGRTEAWKVLSPQGGGPWDSVARVLPNGSLFLPAVGIQDEGIFRCQAMNRNGKETKSNYRVRVYQIPGKPEIVDSASELTAGVPNKVGTCVSEGSYPAGTLSWHLDGKPLVPNEKGVSVKEQTRRHPETGLFTLQSELMVTPARGGDPRPTFSCSFSPGLPRHRALATAPIQPRVWEPVPLEEVQLVVEPEGGAVAPPSVFLFPPKPKDTLMISRTPEVTCVVVDVSHEDPEVKFNWYVDGVEVHNAKTKPREEQYQSTYRVVSVLTVLHQDWLNGKEYKCKVSNKALPAPIEKTISKAKGQPREPQVYTLPPSRDELTKNQVSLTCLVKGFYPSDIAVEWESNGQPENNYKTTPPVLDSDGSFFLYSKLTVDKSRWQQGNVFSCSVMHEALHNHYTQKSLSLSPG

SEQ ID NO: 109 - protein, 437 aa, Artificial Sequence
  Synthetic polypeptide
QNITARIGEPLVLKCKGAPKKPPQRLEWKLNTGRTEAWKVLSPQGGGPWDSVARVLPQGSLFLPAVGIQDEGIFRCQAMNRNGKETKSNYRVRVYQIPGKPEIVDSASELTAGVPNKVGTCVSEGSYPAGTLSWHLDGKPLVPNEKGVSVKEQTRRHPETGLFTLQSELMVTPARGGDPRPTFSCSFSPGLPRHRALATAPIQPRVWEPVPLEEVQLVVEPEGGAVAPPSVFLFPPKPKDTLMISRTPEVTCVVVDVSHEDPEVKFNWYVDGVEVHNAKTKPREEQYQSTYRVVSVLTVLHQDWLNGKEYKCKVSNKALPAPIEKTISKAKGQPREPQVYTLPPSRDELTKNQVSLTCLVKGFYPSDIAVEWESNGQPENNYKTTPPVLDSDGSFFLYSKLTVDKSRWQQGNVFSCSVMHEALHNHYTQKSLSLSPG

SEQ ID NO: 110 - protein, 437 aa, Artificial Sequence
  Synthetic polypeptide
QQITARIGEPLVLKCKGAPKKPPQRLEWKLNTGRTEAWKVLSPQGGGPWDSVARVLPQGSLFLPAVGIQDEGIFRCQAMNRNGKETKSNYRVRVYQIPGKPEIVDSASELTAGVPNKVGTCVSEGSYPAGTLSWHLDGKPLVPNEKGVSVKEQTRRHPETGLFTLQSELMVTPARGGDPRPTFSCSFSPGLPRHRALATAPIQPRVWEPVPLEEVQLVVEPEGGAVAPPSVFLFPPKPKDTLMISRTPEVTCVVVDVSHEDPEVKFNWYVDGVEVHNAKTKPREEQYQSTYRVVSVLTVLHQDWLNGKEYKCKVSNKALPAPIEKTISKAKGQPREPQVYTLPPSRDELTKNQVSLTCLVKGFYPSDIAVEWESNGQPENNYKTTPPVLDSDGSFFLYSKLTVDKSRWQQGNVFSCSVMHEALHNHYTQKSLSLSPG

SEQ ID NO: 111 - protein, 437 aa, Artificial Sequence
  Synthetic polypeptide
QNITARIGEPLVLKCKGAPKKPPQRLEWKLNTGRTEAWKVLSPQGGGPWDSVARVLPNSSLFLPAVGIQDEGIFRCQAMNRNGKETKSNYRVRVYQIPGKPEIVDSASELTAGVPNKVGTCVSEGSYPAGTLSWHLDGKPLVPNEKGVSVKEQTRRHPETGLFTLQSELMVTPARGGDPRPTFSCSFSPGLPRHRALATAPIQPRVWEPVPLEEVQLVVEPEGGAVAPPSVFLFPPKPKDTLMISRTPEVTCVVVDVSHEDPEVKFNWYVDGVEVHNAKTKPREEQYNSTYRVVSVLTVLHQDWLNGKEYKCKVSNKALPAPIEKTISKAKGQPREPQVYTLPPSRDELTKNQVSLTCLVKGFYPSDIAVEWESNGQPENNYKTTPPVLDSDGSFFLYSKLTVDKSRWQQGNVFSCSVMHEALHNHYTQKSLSLSPG

SEQ ID NO: 112 - protein, 438 aa, Artificial Sequence
  Synthetic polypeptide
  MISC_FEATURE (1)..(1): Xaa = pyroglutamic acid
XQITARIGEPLVLKCKGAPKKPPQRLEWKLNTGRTEAWKVLSPQGGGPWDSVARVLPNGSLFLPAVGIQDEGIFRCQAMNRNGKETKSNYRVRVYQIPGKPEIVDSASELTAGVPNKVGTCVSEGSYPAGTLSWHLDGKPLVPNEKGVSVKEQTRRHPETGLFTLQSELMVTPARGGDPRPTFSCSFSPGLPRHRALRTAPIQPRVWEPVPLEEVQLVVEPEGGAVAPPSVFLFPPKPKDTLMISRTPEVTCVVVDVSHEDPEVKFNWYVDGVEVHNAKTKPREEQYNSTYRVVSVLTVLHQDWLNGKEYKCKVSNKALPAPIEKTISKAKGQPREPQVYTLPPSRDELTKNQVSLTCLVKGFYPSDIAVEWESNGQPENNYKTTPPVLDSDGSFFLYSKLTVDKSRWQQGNVFSCSVMHEALHNHYTQKSLSLSPGK

SEQ ID NO: 113 - protein, 438 aa, Artificial Sequence
  Synthetic polypeptide
  MISC_FEATURE (1)..(1): Xaa = pyroglutamic acid
XNITARIGEPLVLKCKGAPKKPPQRLEWKLNTGRTEAWKVLSPQGGGPWDSVARVLPQGSLFLPAVGIQDEGIFRCQAMNRNGKETKSNYRVRVYQIPGKPEIVDSASELTAGVPNKVGTCVSEGSYPAGTLSWHLDGKPLVPNEKGVSVKEQTRRHPETGLFTLQSELMVTPARGGDPRPTFSCSFSPGLPRHRALRTAPIQPRVWEPVPLEEVQLVVEPEGGAVAPPSVFLFPPKPKDTLMISRTPEVTCVVVDVSHEDPEVKFNWYVDGVEVHNAKTKPREEQYNSTYRVVSVLTVLHQDWLNGKEYKCKVSNKALPAPIEKTISKAKGQPREPQVYTLPPSRDELTKNQVSLTCLVKGFYPSDIAVEWESNGQPENNYKTTPPVLDSDGSFFLYSKLTVDKSRWQQGNVFSCSVMHEALHNHYTQKSLSLSPGK

SEQ ID NO: 114 - protein, 438 aa, Artificial Sequence
  Synthetic polypeptide
  MISC_FEATURE (1)..(1): Xaa = pyroglutamic acid
XQITARIGEPLVLKCKGAPKKPPQRLEWKLNTGRTEAWKVLSPQGGGPWDSVARVLPQGSLFLPAVGIQDEGIFRCQAMNRNGKETKSNYRVRVYQIPGKPEIVDSASELTAGVPNKVGTCVSEGSYPAGTLSWHLDGKPLVPNEKGVSVKEQTRRHPETGLFTLQSELMVTPARGGDPRPTFSCSFSPGLPRHRALRTAPIQPRVWEPVPLEEVQLVVEPEGGAVAPPSVFLFPPKPKDTLMISRTPEVTCVVVDVSHEDPEVKFNWYVDGVEVHNAKTKPREEQYNSTYRVVSVLTVLHQDWLNGKEYKCKVSNKALPAPIEKTISKAKGQPREPQVYTLPPSRDELTKNQVSLTCLVKGFYPSDIAVEWESNGQPENNYKTTPPVLDSDGSFFLYSKLTVDKSRWQQGNVFSCSVMHEALHNHYTQKSLSLSPGK

SEQ ID NO: 115 - protein, 438 aa, Artificial Sequence
  Synthetic polypeptide
  MISC_FEATURE (1)..(1): Xaa = pyroglutamic acid
XNITARIGEPLVLKCKGAPKKPPQRLEWKLNTGRTEAWKVLSPQGGGPWDSVARVLPNGSLFLPAVGIQDEGIFRCQAMNRNGKETKSNYRVRVYQIPGKPEIVDSASELTAGVPNKVGTCVSEGSYPAGTLSWHLDGKPLVPNEKGVSVKEQTRRHPETGLFTLQSELMVTPARGGDPRPTFSCSFSPGLPRHAALRTAPIQPRVWEPVPLEEVQLVVEPEGGAVAPPSVFLFPPKPKDTLMISRTPEVTCVVVDVSHEDPEVKFNWYVDGVEVHNAKTKPREEQYNSTYRVVSVLTVLHQDWLNGKEYKCKVSNKALPAPIEKTISKAKGQPREPQVYTLPPSRDELTKNQVSLTCLVKGFYPSDIAVEWESNGQPENNYKTTPPVLDSDGSFFLYSKLTVDKSRWQQGNVFSCSVMHEALHNHYTQKSLSLSPGK

SEQ ID NO: 116 - protein, 438 aa, Artificial Sequence
  Synthetic polypeptide
  MISC_FEATURE (1)..(1): Xaa = pyroglutamic acid
XNITARIGEPLVLKCKGAPKKPPQRLEWKLNTGRTEAWKVLSPQGGGPWDSVARVLPNGSLFLPAVGIQDEGIFRCQAMNRNGKETKSNYRVRVYQIPGKPEIVDSASELTAGVPNKVGTCVSEGSYPAGTLSWHLDGKPLVPNEKGVSVKEQTRRHPETGLFTLQSELMVTPARGGDPRPTFSCSFSPGLPRHKALRTAPIQPRVWEPVPLEEVQLVVEPEGGAVAPPSVFLFPPKPKDTLMISRTPEVTCVVVDVSHEDPEVKFNWYVDGVEVHNAKTKPREEQYNSTYRVVSVLTVLHQDWLNGKEYKCKVSNKALPAPIEKTISKAKGQPREPQVYTLPPSRDELTKNQVSLTCLVKGFYPSDIAVEWESNGQPENNYKTTPPVLDSDGSFFLYSKLTVDKSRWQQGNVFSCSVMHEALHNHYTQKSLSLSPGK

SEQ ID NO: 117 - protein, 438 aa, Artificial Sequence
  Synthetic polypeptide
  MISC_FEATURE (1)..(1): Xaa = pyroglutamic acid
XNITARIGEPLVLKCKGAPKKPPQRLEWKLNTGRTEAWKVLSPQGGGPWDSVARVLPNGSLFLPAVGIQDEGIFRCQAMNRNGKETKSNYRVRVYQIPGKPEIVDSASELTAGVPNKVGTCVSEGSYPAGTLSWHLDGKPLVPNEKGVSVKEQTRRHPETGLFTLQSELMVTPARGGDPRPTFSCSFSPGLPRHRALATAPIQPRVWEPVPLEEVQLVVEPEGGAVAPPSVFLFPPKPKDTLMISRTPEVTCVVVDVSHEDPEVKFNWYVDGVEVHNAKTKPREEQYNSTYRVVSVLTVLHQDWLNGKEYKCKVSNKALPAPIEKTISKAKGQPREPQVYTLPPSRDELTKNQVSLTCLVKGFYPSDIAVEWESNGQPENNYKTTPPVLDSDGSFFLYSKLTVDKSRWQQGNVFSCSVMHEALHNHYTQKSLSLSPGK

SEQ ID NO: 118 - protein, 438 aa, Artificial Sequence
  Synthetic polypeptide
  MISC_FEATURE (1)..(1): Xaa = pyroglutamic acid
XNITARIGEPLVLKCKGAPKKPPQRLEWKLNTGRTEAWKVLSPQGGGPWDSVARVLPNGSLFLPAVGIQDEGIFRCQAMNRNGKETKSNYRVRVYQIPGKPEIVDSASELTAGVPNKVGTCVSEGSYPAGTLSWHLDGKPLVPNEKGVSVKEQTRRHPETGLFTLQSELMVTPARGGDPRPTFSCSFSPGLPRHRALKTAPIQPRVWEPVPLEEVQLVVEPEGGAVAPPSVFLFPPKPKDTLMISRTPEVTCVVVDVSHEDPEVKFNWYVDGVEVHNAKTKPREEQYNSTYRVVSVLTVLHQDWLNGKEYKCKVSNKALPAPIEKTISKAKGQPREPQVYTLPPSRDELTKNQVSLTCLVKGFYPSDIAVEWESNGQPENNYKTTPPVLDSDGSFFLYSKLTVDKSRWQQGNVFSCSVMHEALHNHYTQKSLSLSPGK

SEQ ID NO: 119 - protein, 438 aa, Artificial Sequence
  Synthetic polypeptide
  MISC_FEATURE (1)..(1): Xaa = pyroglutamic acid
XNITARIGEPLVLKCKGAPKKPPQRLEWKLNTGRTEAWKVLSPQGGGPWDSVARVLPNGSLFLPAVGIQDEGIFRCQAMNRNGKETKSNYRVRVYQIPGKPEIVDSASELTAGVPNKVGTCVSEGSYPAGTLSWHLDGKPLVPNEKGVSVKEQTRRHPETGLFTLQSELMVTPARGGDPRPTFSCSFSPGLPRHRALHTAPIQPRVWEPVPLEEVQLVVEPEGGAVAPPSVFLFPPKPKDTLMISRTPEVTCVVVDVSHEDPEVKFNWYVDGVEVHNAKTKPREEQYNSTYRVVSVLTVLHQDWLNGKEYKCKVSNKALPAPIEKTISKAKGQPREPQVYTLPPSRDELTKNQVSLTCLVKGFYPSDIAVEWESNGQPENNYKTTPPVLDSDGSFFLYSKLTVDKSRWQQGNVFSCSVMHEALHNHYTQKSLSLSPGK

SEQ ID NO: 120 - protein, 438 aa, Artificial Sequence
  Synthetic polypeptide
  MISC_FEATURE (1)..(1): Xaa = pyroglutamic acid
XNITARIGEPLVLKCKGAPKKPPQRLEWKLNTGRTEAWKVLSPQGGGPWDSVARVLPNGSLFLPAVGIQDEGIFRCQAMNRNGKETKSNYRVRVYQIPGKPEIVDSASELTAGVPNKVGTCVSEGSYPAGTLSWHLDGKPLVPNEKGVSVKEQTRRHPETGLFTLQSELMVTPARGGDPRPTFSCSFSPGLPRHRALTTAPIQPRVWEPVPLEEVQLVVEPEGGAVAPPSVFLFPPKPKDTLMISRTPEVTCVVVDVSHEDPEVKFNWYVDGVEVHNAKTKPREEQYNSTYRVVSVLTVLHQDWLNGKEYKCKVSNKALPAPIEKTISKAKGQPREPQVYTLPPSRDELTKNQVSLTCLVKGFYPSDIAVEWESNGQPENNYKTTPPVLDSDGSFFLYSKLTVDKSRWQQGNVFSCSVMHEALHNHYTQKSLSLSPGK

SEQ ID NO: 121 - protein, 438 aa, Artificial Sequence
  Synthetic polypeptide
  MISC_FEATURE (1)..(1): Xaa = pyroglutamic acid
XQITARIGEPLVLKCKGAPKKPPQRLEWKLNTGRTEAWKVLSPQGGGPWDSVARVLPNGSLFLPAVGIQDEGIFRCQAMNRNGKETKSNYRVRVYQIPGKPEIVDSASELTAGVPNKVGTCVSEGSYPAGTLSWHLDGKPLVPNEKGVSVKEQTRRHPETGLFTLQSELMVTPARGGDPRPTFSCSFSPGLPRHRALATAPIQPRVWEPVPLEEVQLVVEPEGGAVAPPSVFLFPPKPKDTLMISRTPEVTCVVVDVSHEDPEVKFNWYVDGVEVHNAKTKPREEQYNSTYRVVSVLTVLHQDWLNGKEYKCKVSNKALPAPIEKTISKAKGQPREPQVYTLPPSRDELTKNQVSLTCLVKGFYPSDIAVEWESNGQPENNYKTTPPVLDSDGSFFLYSKLTVDKSRWQQGNVFSCSVMHEALHNHYTQKSLSLSPGK

SEQ ID NO: 122 - protein, 438 aa, Artificial Sequence
  Synthetic polypeptide
  MISC_FEATURE (1)..(1): Xaa = pyroglutamic acid
XNITARIGEPLVLKCKGAPKKPPQRLEWKLNTGRTEAWKVLSPQGGGPWDSVARVLPQGSLFLPAVGIQDEGIFRCQAMNRNGKETKSNYRVRVYQIPGKPEIVDSASELTAGVPNKVGTCVSEGSYPAGTLSWHLDGKPLVPNEKGVSVKEQTRRHPETGLFTLQSELMVTPARGGDPRPTFSCSFSPGLPRHRALATAPIQPRVWEPVPLEEVQLVVEPEGGAVAPPSVFLFPPKPKDTLMISRTPEVTCVVVDVSHEDPEVKFNWYVDGVEVHNAKTKPREEQYNSTYRVVSVLTVLHQDWLNGKEYKCKVSNKALPAPIEKTISKAKGQPREPQVYTLPPSRDELTKNQVSLTCLVKGFYPSDIAVEWESNGQPENNYKTTPPVLDSDGSFFLYSKLTVDKSRWQQGNVFSCSVMHEALHNHYTQKSLSLSPGK

SEQ ID NO: 123 - protein, 438 aa, Artificial Sequence
  Synthetic polypeptide
  MISC_FEATURE (1)..(1): Xaa = pyroglutamic acid
XQITARIGEPLVLKCKGAPKKPPQRLEWKLNTGRTEAWKVLSPQGGGPWDSVARVLPQGSLFLPAVGIQDEGIFRCQAMNRNGKETKSNYRVRVYQIPGKPEIVDSASELTAGVPNKVGTCVSEGSYPAGTLSWHLDGKPLVPNEKGVSVKEQTRRHPETGLFTLQSELMVTPARGGDPRPTFSCSFSPGLPRHRALATAPIQPRVWEPVPLEEVQLVVEPEGGAVAPPSVFLFPPKPKDTLMISRTPEVTCVVVDVSHEDPEVKFNWYVDGVEVHNAKTKPREEQYNSTYRVVSVLTVLHQDWLNGKEYKCKVSNKALPAPIEKTISKAKGQPREPQVYTLPPSRDELTKNQVSLTCLVKGFYPSDIAVEWESNGQPENNYKTTPPVLDSDGSFFLYSKLTVDKSRWQQGNVFSCSVMHEALHNHYTQKSLSLSPGK

SEQ ID NO: 124 - protein, 438 aa, Artificial Sequence
  Synthetic polypeptide
  MISC_FEATURE (1)..(1): Xaa = pyroglutamic acid
XNITARIGEPLVLKCKGAPKKPPQRLEWKLNTGRTEAWKVLSPQGGGPWDSVARVLPNGSLFLPAVGIQDEGIFRCQAMNRNGKETKSNYRVRVYQIPGKPEIVDSASELTAGVPNKVGTCVSEGSYPAGTLSWHLDGKPLVPNEKGVSVKEQTRRHPETGLFTLQSELMVTPARGGDPRPTFSCSFSPGLPRHRALRTAPIQPRVWEPVPLEEVQLVVEPEGGAVAPPSVFLFPPKPKDTLMISRTPEVTCVVVDVSHEDPEVKFNWYVDGVEVHNAKTKPREEQYQSTYRVVSVLTVLHQDWLNGKEYKCKVSNKALPAPIEKTISKAKGQPREPQVYTLPPSRDELTKNQVSLTCLVKGFYPSDIAVEWESNGQPENNYKTTPPVLDSDGSFFLYSKLTVDKSRWQQGNVFSCSVMHEALHNHYTQKSLSLSPGK

SEQ ID NO: 125 - protein, 438 aa, Artificial Sequence
  Synthetic polypeptide
  MISC_FEATURE (1)..(1): Xaa = pyroglutamic acid
XQITARIGEPLVLKCKGAPKKPPQRLEWKLNTGRTEAWKVLSPQGGGPWDSVARVLPNGSLFLPAVGIQDEGIFRCQAMNRNGKETKSNYRVRVYQIPGKPEIVDSASELTAGVPNKVGTCVSEGSYPAGTLSWHLDGKPLVPNEKGVSVKEQTRRHPETGLFTLQSELMVTPARGGDPRPTFSCSFSPGLPRHRALRTAPIQPRVWEPVPLEEVQLVVEPEGGAVAPPSVFLFPPKPKDTLMISRTPEVTCVVVDVSHEDPEVKFNWYVDGVEVHNAKTKPREEQYQSTYRVVSVLTVLHQDWLNGKEYKCKVSNKALPAPIEKTISKAKGQPREPQVYTLPPSRDELTKNQVSLTCLVKGFYPSDIAVEWESNGQPENNYKTTPPVLDSDGSFFLYSKLTVDKSRWQQGNVFSCSVMHEALHNHYTQKSLSLSPGK

SEQ ID NO: 126 - protein, 438 aa, Artificial Sequence
  Synthetic polypeptide
  MISC_FEATURE (1)..(1): Xaa = pyroglutamic acid
XNITARIGEPLVLKCKGAPKKPPQRLEWKLNTGRTEAWKVLSPQGGGPWDSVARVLPQGSLFLPAVGIQDEGIFRCQAMNRNGKETKSNYRVRVYQIPGKPEIVDSASELTAGVPNKVGTCVSEGSYPAGTLSWHLDGKPLVPNEKGVSVKEQTRRHPETGLFTLQSELMVTPARGGDPRPTFSCSFSPGLPRHRALRTAPIQPRVWEPVPLEEVQLVVEPEGGAVAPPSVFLFPPKPKDTLMISRTPEVTCVVVDVSHEDPEVKFNWYVDGVEVHNAKTKPREEQYQSTYRVVSVLTVLHQDWLNGKEYKCKVSNKALPAPIEKTISKAKGQPREPQVYTLPPSRDELTKNQVSLTCLVKGFYPSDIAVEWESNGQPENNYKTTPPVLDSDGSFFLYSKLTVDKSRWQQGNVFSCSVMHEALHNHYTQKSLSLSPGK

SEQ ID NO: 127 - protein, 438 aa, Artificial Sequence
  Synthetic polypeptide
  MISC_FEATURE (1)..(1): Xaa = pyroglutamic acid
XQITARIGEPLVLKCKGAPKKPPQRLEWKLNTGRTEAWKVLSPQGGGPWDSVARVLPQGSLFLPAVGIQDEGIFRCQAMNRNGKETKSNYRVRVYQIPGKPEIVDSASELTAGVPNKVGTCVSEGSYPAGTLSWHLDGKPLVPNEKGVSVKEQTRRHPETGLFTLQSELMVTPARGGDPRPTFSCSFSPGLPRHRALRTAPIQPRVWEPVPLEEVQLVVEPEGGAVAPPSVFLFPPKPKDTLMISRTPEVTCVVVDVSHEDPEVKFNWYVDGVEVHNAKTKPREEQYQSTYRVVSVLTVLHQDWLNGKEYKCKVSNKALPAPIEKTISKAKGQPREPQVYTLPPSRDELTKNQVSLTCLVKGFYPSDIAVEWESNGQPENNYKTTPPVLDSDGSFFLYSKLTVDKSRWQQGNVFSCSVMHEALHNHYTQKSLSLSPGK

SEQ ID NO: 128 - protein, 438 aa, Artificial Sequence
  Synthetic polypeptide
  MISC_FEATURE (1)..(1): Xaa = pyroglutamic acid
XQITARIGEPLVLKCKGAPKKPPQRLEWKLNTGRTEAWKVLSPQGGGPWDSVARVLPNGSLFLPAVGIQDEGIFRCQAMNRNGKETKSNYRVRVYQIPGKPEIVDSASELTAGVPNKVGTCVSEGSYPAGTLSWHLDGKPLVPNEKGVSVKEQTRRHPETGLFTLQSELMVTPARGGDPRPTFSCSFSPGLPRHRALATAPIQPRVWEPVPLEEVQLVVEPEGGAVAPPSVFLFPPKPKDTLMISRTPEVTCVVVDVSHEDPEVKFNWYVDGVEVHNAKTKPREEQYQSTYRVVSVLTVLHQDWLNGKEYKCKVSNKALPAPIEKTISKAKGQPREPQVYTLPPSRDELTKNQVSLTCLVKGFYPSDIAVEWESNGQPENNYKTTPPVLDSDGSFFLYSKLTVDKSRWQQGNVFSCSVMHEALHNHYTQKSLSLSPGK

SEQ ID NO: 129 - protein, 438 aa, Artificial Sequence
  Synthetic polypeptide
  MISC_FEATURE (1)..(1): Xaa = pyroglutamic acid
XNITARIGEPLVLKCKGAPKKPPQRLEWKLNTGRTEAWKVLSPQGGGPWDSVARVLPQGSLFLPAVGIQDEGIFRCQAMNRNGKETKSNYRVRVYQIPGKPEIVDSASELTAGVPNKVGTCVSEGSYPAGTLSWHLDGKPLVPNEKGVSVKEQTRRHPETGLFTLQSELMVTPARGGDPRPTFSCSFSPGLPRHRALATAPIQPRVWEPVPLEEVQLVVEPEGGAVAPPSVFLFPPKPKDTLMISRTPEVTCVVVDVSHEDPEVKFNWYVDGVEVHNAKTKPREEQYQSTYRVVSVLTVLHQDWLNGKEYKCKVSNKALPAPIEKTISKAKGQPREPQVYTLPPSRDELTKNQVSLTCLVKGFYPSDIAVEWESNGQPENNYKTTPPVLDSDGSFFLYSKLTVDKSRWQQGNVFSCSVMHEALHNHYTQKSLSLSPGK

SEQ ID NO: 130 - protein, 438 aa, Artificial Sequence
  Synthetic polypeptide
  MISC_FEATURE (1)..(1): Xaa = pyroglutamic acid
XQITARIGEPLVLKCKGAPKKPPQRLEWKLNTGRTEAWKVLSPQGGGPWDSVARVLPQGSLFLPAVGIQDEGIFRCQAMNRNGKETKSNYRVRVYQIPGKPEIVDSASELTAGVPNKVGTCVSEGSYPAGTLSWHLDGKPLVPNEKGVSVKEQTRRHPETGLFTLQSELMVTPARGGDPRPTFSCSFSPGLPRHRALATAPIQPRVWEPVPLEEVQLVVEPEGGAVAPPSVFLFPPKPKDTLMISRTPEVTCVVVDVSHEDPEVKFNWYVDGVEVHNAKTKPREEQYQSTYRVVSVLTVLHQDWLNGKEYKCKVSNKALPAPIEKTISKAKGQPREPQVYTLPPSRDELTKNQVSLTCLVKGFYPSDIAVEWESNGQPENNYKTTPPVLDSDGSFFLYSKLTVDKSRWQQGNVFSCSVMHEALHNHYTQKSLSLSPGK

SEQ ID NO: 131 - protein, 438 aa, Artificial Sequence
  Synthetic polypeptide
  MISC_FEATURE (1)..(1): Xaa = pyroglutamic acid
XNITARIGEPLVLKCKGAPKKPPQRLEWKLNTGRTEAWKVLSPQGGGPWDSVARVLPNSSLFLPAVGIQDEGIFRCQAMNRNGKETKSNYRVRVYQIPGKPEIVDSASELTAGVPNKVGTCVSEGSYPAGTLSWHLDGKPLVPNEKGVSVKEQTRRHPETGLFTLQSELMVTPARGGDPRPTFSCSFSPGLPRHRALATAPIQPRVWEPVPLEEVQLVVEPEGGAVAPPSVFLFPPKPKDTLMISRTPEVTCVVVDVSHEDPEVKFNWYVDGVEVHNAKTKPREEQYNSTYRVVSVLTVLHQDWLNGKEYKCKVSNKALPAPIEKTISKAKGQPREPQVYTLPPSRDELTKNQVSLTCLVKGFYPSDIAVEWESNGQPENNYKTTPPVLDSDGSFFLYSKLTVDKSRWQQGNVFSCSVMHEALHNHYTQKSLSLSPGK

SEQ ID NO: 132 - protein, 437 aa, Artificial Sequence
  Synthetic polypeptide
QITARIGEPLVLKCKGAPKKPPQRLEWKLNTGRTEAWKVLSPQGGGPWDSVARVLPNGSLFLPAVGIQDEGIFRCQAMNRNGKETKSNYRVRVYQIPGKPEIVDSASELTAGVPNKVGTCVSEGSYPAGTLSWHLDGKPLVPNEKGVSVKEQTRRHPETGLFTLQSELMVTPARGGDPRPTFSCSFSPGLPRHRALRTAPIQPRVWEPVPLEEVQLVVEPEGGAVAPPSVFLFPPKPKDTLMISRTPEVTCVVVDVSHEDPEVKFNWYVDGVEVHNAKTKPREEQYNSTYRVVSVLTVLHQDWLNGKEYKCKVSNKALPAPIEKTISKAKGQPREPQVYTLPPSRDELTKNQVSLTCLVKGFYPSDIAVEWESNGQPENNYKTTPPVLDSDGSFFLYSKLTVDKSRWQQGNVFSCSVMHEALHNHYTQKSLSLSPGK

SEQ ID NO: 133 - protein, 437 aa, Artificial Sequence
  Synthetic polypeptide
NITARIGEPLVLKCKGAPKKPPQRLEWKLNTGRTEAWKVLSPQGGGPWDSVARVLPQGSLFLPAVGIQDEGIFRCQAMNRNGKETKSNYRVRVYQIPGKPEIVDSASELTAGVPNKVGTCVSEGSYPAGTLSWHLDGKPLVPNEKGVSVKEQTRRHPETGLFTLQSELMVTPARGGDPRPTFSCSFSPGLPRHRALRTAPIQPRVWEPVPLEEVQLVVEPEGGAVAPPSVFLFPPKPKDTLMISRTPEVTCVVVDVSHEDPEVKFNWYVDGVEVHNAKTKPREEQYNSTYRVVSVLTVLHQDWLNGKEYKCKVSNKALPAPIEKTISKAKGQPREPQVYTLPPSRDELTKNQVSLTCLVKGFYPSDIAVEWESNGQPENNYKTTPPVLDSDGSFFLYSKLTVDKSRWQQGNVFSCSVMHEALHNHYTQKSLSLSPGK

SEQ ID NO: 134 - protein, 437 aa, Artificial Sequence
  Synthetic polypeptide
QITARIGEPLVLKCKGAPKKPPQRLEWKLNTGRTEAWKVLSPQGGGPWDSVARVLPQGSLFLPAVGIQDEGIFRCQAMNRNGKETKSNYRVRVYQIPGKPEIVDSASELTAGVPNKVGTCVSEGSYPAGTLSWHLDGKPLVPNEKGVSVKEQTRRHPETGLFTLQSELMVTPARGGDPRPTFSCSFSPGLPRHRALRTAPIQPRVWEPVPLEEVQLVVEPEGGAVAPPSVFLFPPKPKDTLMISRTPEVTCVVVDVSHEDPEVKFNWYVDGVEVHNAKTKPREEQYNSTYRVVSVLTVLHQDWLNGKEYKCKVSNKALPAPIEKTISKAKGQPREPQVYTLPPSRDELTKNQVSLTCLVKGFYPSDIAVEWESNGQPENNYKTTPPVLDSDGSFFLYSKLTVDKSRWQQGNVFSCSVMHEALHNHYTQKSLSLSPGK

SEQ ID NO: 135 - protein, 437 aa, Artificial Sequence
  Synthetic polypeptide
NITARIGEPLVLKCKGAPKKPPQRLEWKLNTGRTEAWKVLSPQGGGPWDSVARVLPNGSLFLPAVGIQDEGIFRCQAMNRNGKETKSNYRVRVYQIPGKPEIVDSASELTAGVPNKVGTCVSEGSYPAGTLSWHLDGKPLVPNEKGVSVKEQTRRHPETGLFTLQSELMVTPARGGDPRPTFSCSFSPGLPRHAALRTAPIQPRVWEPVPLEEVQLVVEPEGGAVAPPSVFLFPPKPKDTLMISRTPEVTCVVVDVSHEDPEVKFNWYVDGVEVHNAKTKPREEQYNSTYRVVSVLTVLHQDWLNGKEYKCKVSNKALPAPIEKTISKAKGQPREPQVYTLPPSRDELTKNQVSLTCLVKGFYPSDIAVEWESNGQPENNYKTTPPVLDSDGSFFLYSKLTVDKSRWQQGNVFSCSVMHEALHNHYTQKSLSLSPGK

SEQ ID NO: 136 - protein, 437 aa, Artificial Sequence
  Synthetic polypeptide
NITARIGEPLVLKCKGAPKKPPQRLEWKLNTGRTEAWKVLSPQGGGPWDSVARVLPNGSLFLPAVGIQDEGIFRCQAMNRNGKETKSNYRVRVYQIPGKPEIVDSASELTAGVPNKVGTCVSEGSYPAGTLSWHLDGKPLVPNEKGVSVKEQTRRHPETGLFTLQSELMVTPARGGDPRPTFSCSFSPGLPRHKALRTAPIQPRVWEPVPLEEVQLVVEPEGGAVAPPSVFLFPPKPKDTLMISRTPEVTCVVVDVSHEDPEVKFNWYVDGVEVHNAKTKPREEQYNSTYRVVSVLTVLHQDWLNGKEYKCKVSNKALPAPIEKTISKAKGQPREPQVYTLPPSRDELTKNQVSLTCLVKGFYPSDIAVEWESNGQPENNYKTTPPVLDSDGSFFLYSKLTVDKSRWQQGNVFSCSVMHEALHNHYTQKSLSLSPGK

SEQ ID NO: 137 - protein, 437 aa, Artificial Sequence
  Synthetic polypeptide
NITARIGEPLVLKCKGAPKKPPQRLEWKLNTGRTEAWKVLSPQGGGPWDSVARVLPNGSLFLPAVGIQDEGIFRCQAMNRNGKETKSNYRVRVYQIPGKPEIVDSASELTAGVPNKVGTCVSEGSYPAGTLSWHLDGKPLVPNEKGVSVKEQTRRHPETGLFTLQSELMVTPARGGDPRPTFSCSFSPGLPRHRALATAPIQPRVWEPVPLEEVQLVVEPEGGAVAPPSVFLFPPKPKDTLMISRTPEVTCVVVDVSHEDPEVKFNWYVDGVEVHNAKTKPREEQYNSTYRVVSVLTVLHQDWLNGKEYKCKVSNKALPAPIEKTISKAKGQPREPQVYTLPPSRDELTKNQVSLTCLVKGFYPSDIAVEWESNGQPENNYKTTPPVLDSDGSFFLYSKLTVDKSRWQQGNVFSCSVMHEALHNHYTQKSLSLSPGK

SEQ ID NO: 138 - protein, 437 aa, Artificial Sequence
  Synthetic polypeptide
NITARIGEPLVLKCKGAPKKPPQRLEWKLNTGRTEAWKVLSPQGGGPWDSVARVLPNGSLFLPAVGIQDEGIFRCQAMNRNGKETKSNYRVRVYQIPGKPEIVDSASELTAGVPNKVGTCVSEGSYPAGTLSWHLDGKPLVPNEKGVSVKEQTRRHPETGLFTLQSELMVTPARGGDPRPTFSCSFSPGLPRHRALKTAPIQPRVWEPVPLEEVQLVVEPEGGAVAPPSVFLFPPKPKDTLMISRTPEVTCVVVDVSHEDPEVKFNWYVDGVEVHNAKTKPREEQYNSTYRVVSVLTVLHQDWLNGKEYKCKVSNKALPAPIEKTISKAKGQPREPQVYTLPPSRDELTKNQVSLTCLVKGFYPSDIAVEWESNGQPENNYKTTPPVLDSDGSFFLYSKLTVDKSRWQQGNVFSCSVMHEALHNHYTQKSLSLSPGK

SEQ ID NO: 139 - protein, 437 aa, Artificial Sequence
  Synthetic polypeptide
NITARIGEPLVLKCKGAPKKPPQRLEWKLNTGRTEAWKVLSPQGGGPWDSVARVLPNGSLFLPAVGIQDEGIFRCQAMNRNGKETKSNYRVRVYQIPGKPEIVDSASELTAGVPNKVGTCVSEGSYPAGTLSWHLDGKPLVPNEKGVSVKEQTRRHPETGLFTLQSELMVTPARGGDPRPTFSCSFSPGLPRHRALHTAPIQPRVWEPVPLEEVQLVVEPEGGAVAPPSVFLFPPKPKDTLMISRTPEVTCVVVDVSHEDPEVKFNWYVDGVEVHNAKTKPREEQYNSTYRVVSVLTVLHQDWLNGKEYKCKVSNKALPAPIEKTISKAKGQPREPQVYTLPPSRDELTKNQVSLTCLVKGFYPSDIAVEWESNGQPENNYKTTPPVLDSDGSFFLYSKLTVDKSRWQQGNVFSCSVMHEALHNHYTQKSLSLSPGK

SEQ ID NO: 140 - protein, 437 aa, Artificial Sequence
  Synthetic polypeptide
NITARIGEPLVLKCKGAPKKPPQRLEWKLNTGRTEAWKVLSPQGGGPWDSVARVLPNGSLFLPAVGIQDEGIFRCQAMNRNGKETKSNYRVRVYQIPGKPEIVDSASELTAGVPNKVGTCVSEGSYPAGTLSWHLDGKPLVPNEKGVSVKEQTRRHPETGLFTLQSELMVTPARGGDPRPTFSCSFSPGLPRHRALTTAPIQPRVWEPVPLEEVQLVVEPEGGAVAPPSVFLFPPKPKDTLMISRTPEVTCVVVDVSHEDPEVKFNWYVDGVEVHNAKTKPREEQYNSTYRVVSVLTVLHQDWLNGKEYKCKVSNKALPAPIEKTISKAKGQPREPQVYTLPPSRDELTKNQVSLTCLVKGFYPSDIAVEWESNGQPENNYKTTPPVLDSDGSFFLYSKLTVDKSRWQQGNVFSCSVMHEALHNHYTQKSLSLSPGK

SEQ ID NO: 141 - protein, 437 aa, Artificial Sequence
  Synthetic polypeptide
QITARIGEPLVLKCKGAPKKPPQRLEWKLNTGRTEAWKVLSPQGGGPWDSVARVLPNGSLFLPAVGIQDEGIFRCQAMNRNGKETKSNYRVRVYQIPGKPEIVDSASELTAGVPNKVGTCVSEGSYPAGTLSWHLDGKPLVPNEKGVSVKEQTRRHPETGLFTLQSELMVTPARGGDPRPTFSCSFSPGLPRHRALATAPIQPRVWEPVPLEEVQLVVEPEGGAVAPPSVFLFPPKPKDTLMISRTPEVTCVVVDVSHEDPEVKFNWYVDGVEVHNAKTKPREEQYNSTYRVVSVLTVLHQDWLNGKEYKCKVSNKALPAPIEKTISKAKGQPREPQVYTLPPSRDELTKNQVSLTCLVKGFYPSDIAVEWESNGQPENNYKTTPPVLDSDGSFFLYSKLTVDKSRWQQGNVFSCSVMHEALHNHYTQKSLSLSPGK

SEQ ID NO: 142 - protein, 437 aa, Artificial Sequence
  Synthetic polypeptide
NITARIGEPLVLKCKGAPKKPPQRLEWKLNTGRTEAWKVLSPQGGGPWDSVARVLPQGSLFLPAVGIQDEGIFRCQAMNRNGKETKSNYRVRVYQIPGKPEIVDSASELTAGVPNKVGTCVSEGSYPAGTLSWHLDGKPLVPNEKGVSVKEQTRRHPETGLFTLQSELMVTPARGGDPRPTFSCSFSPGLPRHRALATAPIQPRVWEPVPLEEVQLVVEPEGGAVAPPSVFLFPPKPKDTLMISRTPEVTCVVVDVSHEDPEVKFNWYVDGVEVHNAKTKPREEQYNSTYRVVSVLTVLHQDWLNGKEYKCKVSNKALPAPIEKTISKAKGQPREPQVYTLPPSRDELTKNQVSLTCLVKGFYPSDIAVEWESNGQPENNYKTTPPVLDSDGSFFLYSKLTVDKSRWQQGNVFSCSVMHEALHNHYTQKSLSLSPGK

SEQ ID NO: 143 - protein, 437 aa, Artificial Sequence
  Synthetic polypeptide
QITARIGEPLVLKCKGAPKKPPQRLEWKLNTGRTEAWKVLSPQGGGPWDSVARVLPQGSLFLPAVGIQDEGIFRCQAMNRNGKETKSNYRVRVYQIPGKPEIVDSASELTAGVPNKVGTCVSEGSYPAGTLSWHLDGKPLVPNEKGVSVKEQTRRHPETGLFTLQSELMVTPARGGDPRPTFSCSFSPGLPRHRALATAPIQPRVWEPVPLEEVQLVVEPEGGAVAPPSVFLFPPKPKDTLMISRTPEVTCVVVDVSHEDPEVKFNWYVDGVEVHNAKTKPREEQYNSTYRVVSVLTVLHQDWLNGKEYKCKVSNKALPAPIEKTISKAKGQPREPQVYTLPPSRDELTKNQVSLTCLVKGFYPSDIAVEWESNGQPENNYKTTPPVLDSDGSFFLYSKLTVDKSRWQQGNVFSCSVMHEALHNHYTQKSLSLSPGK

SEQ ID NO: 144 - protein, 437 aa, Artificial Sequence
  Synthetic polypeptide
NITARIGEPLVLKCKGAPKKPPQRLEWKLNTGRTEAWKVLSPQGGGPWDSVARVLPNGSLFLPAVGIQDEGIFRCQAMNRNGKETKSNYRVRVYQIPGKPEIVDSASELTAGVPNKVGTCVSEGSYPAGTLSWHLDGKPLVPNEKGVSVKEQTRRHPETGLFTLQSELMVTPARGGDPRPTFSCSFSPGLPRHRALRTAPIQPRVWEPVPLEEVQLVVEPEGGAVAPPSVFLFPPKPKDTLMISRTPEVTCVVVDVSHEDPEVKFNWYVDGVEVHNAKTKPREEQYQSTYRVVSVLTVLHQDWLNGKEYKCKVSNKALPAPIEKTISKAKGQPREPQVYTLPPSRDELTKNQVSLTCLVKGFYPSDIAVEWESNGQPENNYKTTPPVLDSDGSFFLYSKLTVDKSRWQQGNVFSCSVMHEALHNHYTQKSLSLSPGK

SEQ ID NO: 145 - protein, 437 aa, Artificial Sequence
  Synthetic polypeptide
QITARIGEPLVLKCKGAPKKPPQRLEWKLNTGRTEAWKVLSPQGGGPWDSVARVLPNGSLFLPAVGIQDEGIFRCQAMNRNGKETKSNYRVRVYQIPGKPEIVDSASELTAGVPNKVGTCVSEGSYPAGTLSWHLDGKPLVPNEKGVSVKEQTRRHPETGLFTLQSELMVTPARGGDPRPTFSCSFSPGLPRHRALRTAPIQPRVWEPVPLEEVQLVVEPEGGAVAPPSVFLFPPKPKDTLMISRTPEVTCVVVDVSHEDPEVKFNWYVDGVEVHNAKTKPREEQYQSTYRVVSVLTVLHQDWLNGKEYKCKVSNKALPAPIEKTISKAKGQPREPQVYTLPPSRDELTKNQVSLTCLVKGFYPSDIAVEWESNGQPENNYKTTPPVLDSDGSFFLYSKLTVDKSRWQQGNVFSCSVMHEALHNHYTQKSLSLSPGK

SEQ ID NO: 146 - protein, 437 aa, Artificial Sequence
  Synthetic polypeptide
NITARIGEPLVLKCKGAPKKPPQRLEWKLNTGRTEAWKVLSPQGGGPWDSVARVLPQGSLFLPAVGIQDEGIFRCQAMNRNGKETKSNYRVRVYQIPGKPEIVDSASELTAGVPNKVGTCVSEGSYPAGTLSWHLDGKPLVPNEKGVSVKEQTRRHPETGLFTLQSELMVTPARGGDPRPTFSCSFSPGLPRHRALRTAPIQPRVWEPVPLEEVQLVVEPEGGAVAPPSVFLFPPKPKDTLMISRTPEVTCVVVDVSHEDPEVKFNWYVDGVEVHNAKTKPREEQYQSTYRVVSVLTVLHQDWLNGKEYKCKVSNKALPAPIEKTISKAKGQPREPQVYTLPPSRDELTKNQVSLTCLVKGFYPSDIAVEWESNGQPENNYKTTPPVLDSDGSFFLYSKLTVDKSRWQQGNVFSCSVMHEALHNHYTQKSLSLSPGK

SEQ ID NO: 147 - protein, 437 aa, Artificial Sequence
  Synthetic polypeptide
QITARIGEPLVLKCKGAPKKPPQRLEWKLNTGRTEAWKVLSPQGGGPWDSVARVLPQGSLFLPAVGIQDEGIFRCQAMNRNGKETKSNYRVRVYQIPGKPEIVDSASELTAGVPNKVGTCVSEGSYPAGTLSWHLDGKPLVPNEKGVSVKEQTRRHPETGLFTLQSELMVTPARGGDPRPTFSCSFSPGLPRHRALRTAPIQPRVWEPVPLEEVQLVVEPEGGAVAPPSVFLFPPKPKDTLMISRTPEVTCVVVDVSHEDPEVKFNWYVDGVEVHNAKTKPREEQYQSTYRVVSVLTVLHQDWLNGKEYKCKVSNKALPAPIEKTISKAKGQPREPQVYTLPPSRDELTKNQVSLTCLVKGFYPSDIAVEWESNGQPENNYKTTPPVLDSDGSFFLYSKLTVDKSRWQQGNVFSCSVMHEALHNHYTQKSLSLSPGK

SEQ ID NO: 148 - protein, 437 aa, Artificial Sequence
  Synthetic polypeptide
QITARIGEPLVLKCKGAPKKPPQRLEWKLNTGRTEAWKVLSPQGGGPWDSVARVLPNGSLFLPAVGIQDEGIFRCQAMNRNGKETKSNYRVRVYQIPGKPEIVDSASELTAGVPNKVGTCVSEGSYPAGTLSWHLDGKPLVPNEKGVSVKEQTRRHPETGLFTLQSELMVTPARGGDPRPTFSCSFSPGLPRHRALATAPIQPRVWEPVPLEEVQLVVEPEGGAVAPPSVFLFPPKPKDTLMISRTPEVTCVVVDVSHEDPEVKFNWYVDGVEVHNAKTKPREEQYQSTYRVVSVLTVLHQDWLNGKEYKCKVSNKALPAPIEKTISKAKGQPREPQVYTLPPSRDELTKNQVSLTCLVKGFYPSDIAVEWESNGQPENNYKTTPPVLDSDGSFFLYSKLTVDKSRWQQGNVFSCSVMHEALHNHYTQKSLSLSPGK

SEQ ID NO: 149 - protein, 437 aa, Artificial Sequence
  Synthetic polypeptide
NITARIGEPLVLKCKGAPKKPPQRLEWKLNTGRTEAWKVLSPQGGGPWDSVARVLPQGSLFLPAVGIQDEGIFRCQAMNRNGKETKSNYRVRVYQIPGKPEIVDSASELTAGVPNKVGTCVSEGSYPAGTLSWHLDGKPLVPNEKGVSVKEQTRRHPETGLFTLQSELMVTPARGGDPRPTFSCSFSPGLPRHRALATAPIQPRVWEPVPLEEVQLVVEPEGGAVAPPSVFLFPPKPKDTLMISRTPEVTCVVVDVSHEDPEVKFNWYVDGVEVHNAKTKPREEQYQSTYRVVSVLTVLHQDWLNGKEYKCKVSNKALPAPIEKTISKAKGQPREPQVYTLPPSRDELTKNQVSLTCLVKGFYPSDIAVEWESNGQPENNYKTTPPVLDSDGSFFLYSKLTVDKSRWQQGNVFSCSVMHEALHNHYTQKSLSLSPGK

SEQ ID NO: 150 - protein, 437 aa, Artificial Sequence
  Synthetic polypeptide
QITARIGEPLVLKCKGAPKKPPQRLEWKLNTGRTEAWKVLSPQGGGPWDSVARVLPQGSLFLPAVGIQDEGIFRCQAMNRNGKETKSNYRVRVYQIPGKPEIVDSASELTAGVPNKVGTCVSEGSYPAGTLSWHLDGKPLVPNEKGVSVKEQTRRHPETGLFTLQSELMVTPARGGDPRPTFSCSFSPGLPRHRALATAPIQPRVWEPVPLEEVQLVVEPEGGAVAPPSVFLFPPKPKDTLMISRTPEVTCVVVDVSHEDPEVKFNWYVDGVEVHNAKTKPREEQYQSTYRVVSVLTVLHQDWLNGKEYKCKVSNKALPAPIEKTISKAKGQPREPQVYTLPPSRDELTKNQVSLTCLVKGFYPSDIAVEWESNGQPENNYKTTPPVLDSDGSFFLYSKLTVDKSRWQQGNVFSCSVMHEALHNHYTQKSLSLSPGK

SEQ ID NO: 151 - protein, 437 aa, Artificial Sequence
  Synthetic polypeptide
NITARIGEPLVLKCKGAPKKPPQRLEWKLNTGRTEAWKVLSPQGGGPWDSVARVLPNSSLFLPAVGIQDEGIFRCQAMNRNGKETKSNYRVRVYQIPGKPEIVDSASELTAGVPNKVGTCVSEGSYPAGTLSWHLDGKPLVPNEKGVSVKEQTRRHPETGLFTLQSELMVTPARGGDPRPTFSCSFSPGLPRHRALATAPIQPRVWEPVPLEEVQLVVEPEGGAVAPPSVFLFPPKPKDTLMISRTPEVTCVVVDVSHEDPEVKFNWYVDGVEVHNAKTKPREEQYNSTYRVVSVLTVLHQDWLNGKEYKCKVSNKALPAPIEKTISKAKGQPREPQVYTLPPSRDELTKNQVSLTCLVKGFYPSDIAVEWESNGQPENNYKTTPPVLDSDGSFFLYSKLTVDKSRWQQGNVFSCSVMHEALHNHYTQKSLSLSPGK

SEQ ID NO: 152 - protein, 436 aa, Artificial Sequence
  Synthetic polypeptide
QITARIGEPLVLKCKGAPKKPPQRLEWKLNTGRTEAWKVLSPQGGGPWDSVARVLPNGSLFLPAVGIQDEGIFRCQAMNRNGKETKSNYRVRVYQIPGKPEIVDSASELTAGVPNKVGTCVSEGSYPAGTLSWHLDGKPLVPNEKGVSVKEQTRRHPETGLFTLQSELMVTPARGGDPRPTFSCSFSPGLPRHRALRTAPIQPRVWEPVPLEEVQLVVEPEGGAVAPPSVFLFPPKPKDTLMISRTPEVTCVVVDVSHEDPEVKFNWYVDGVEVHNAKTKPREEQYNSTYRVVSVLTVLHQDWLNGKEYKCKVSNKALPAPIEKTISKAKGQPREPQVYTLPPSRDELTKNQVSLTCLVKGFYPSDIAVEWESNGQPENNYKTTPPVLDSDGSFFLYSKLTVDKSRWQQGNVFSCSVMHEALHNHYTQKSLSLSPG

SEQ ID NO: 153 - protein, 436 aa, Artificial Sequence
  Synthetic polypeptide
NITARIGEPLVLKCKGAPKKPPQRLEWKLNTGRTEAWKVLSPQGGGPWDSVARVLPQGSLFLPAVGIQDEGIFRCQAMNRNGKETKSNYRVRVYQIPGKPEIVDSASELTAGVPNKVGTCVSEGSYPAGTLSWHLDGKPLVPNEKGVSVKEQTRRHPETGLFTLQSELMVTPARGGDPRPTFSCSFSPGLPRHRALRTAPIQPRVWEPVPLEEVQLVVEPEGGAVAPPSVFLFPPKPKDTLMISRTPEVTCVVVDVSHEDPEVKFNWYVDGVEVHNAKTKPREEQYNSTYRVVSVLTVLHQDWLNGKEYKCKVSNKALPAPIEKTISKAKGQPREPQVYTLPPSRDELTKNQVSLTCLVKGFYPSDIAVEWESNGQPENNYKTTPPVLDSDGSFFLYSKLTVDKSRWQQGNVFSCSVMHEALHNHYTQKSLSLSPG

SEQ ID NO: 154 - protein, 436 aa, Artificial Sequence
  Synthetic polypeptide
QITARIGEPLVLKCKGAPKKPPQRLEWKLNTGRTEAWKVLSPQGGGPWDSVARVLPQGSLFLPAVGIQDEGIFRCQAMNRNGKETKSNYRVRVYQIPGKPEIVDSASELTAGVPNKVGTCVSEGSYPAGTLSWHLDGKPLVPNEKGVSVKEQTRRHPETGLFTLQSELMVTPARGGDPRPTFSCSFSPGLPRHRALRTAPIQPRVWEPVPLEEVQLVVEPEGGAVAPPSVFLFPPKPKDTLMISRTPEVTCVVVDVSHEDPEVKFNWYVDGVEVHNAKTKPREEQYNSTYRVVSVLTVLHQDWLNGKEYKCKVSNKALPAPIEKTISKAKGQPREPQVYTLPPSRDELTKNQVSLTCLVKGFYPSDIAVEWESNGQPENNYKTTPPVLDSDGSFFLYSKLTVDKSRWQQGNVFSCSVMHEALHNHYTQKSLSLSPG

SEQ ID NO: 155 - protein, 436 aa, Artificial Sequence
  Synthetic polypeptide
NITARIGEPLVLKCKGAPKKPPQRLEWKLNTGRTEAWKVLSPQGGGPWDSVARVLPNGSLFLPAVGIQDEGIFRCQAMNRNGKETKSNYRVRVYQIPGKPEIVDSASELTAGVPNKVGTCVSEGSYPAGTLSWHLDGKPLVPNEKGVSVKEQTRRHPETGLFTLQSELMVTPARGGDPRPTFSCSFSPGLPRHAALRTAPIQPRVWEPVPLEEVQLVVEPEGGAVAPPSVFLFPPKPKDTLMISRTPEVTCVVVDVSHEDPEVKFNWYVDGVEVHNAKTKPREEQYNSTYRVVSVLTVLHQDWLNGKEYKCKVSNKALPAPIEKTISKAKGQPREPQVYTLPPSRDELTKNQVSLTCLVKGFYPSDIAVEWESNGQPENNYKTTPPVLDSDGSFFLYSKLTVDKSRWQQGNVFSCSVMHEALHNHYTQKSLSLSPG

SEQ ID NO: 156 - protein, 436 aa, Artificial Sequence
  Synthetic polypeptide
NITARIGEPLVLKCKGAPKKPPQRLEWKLNTGRTEAWKVLSPQGGGPWDSVARVLPNGSLFLPAVGIQDEGIFRCQAMNRNGKETKSNYRVRVYQIPGKPEIVDSASELTAGVPNKVGTCVSEGSYPAGTLSWHLDGKPLVPNEKGVSVKEQTRRHPETGLFTLQSELMVTPARGGDPRPTFSCSFSPGLPRHKALRTAPIQPRVWEPVPLEEVQLVVEPEGGAVAPPSVFLFPPKPKDTLMISRTPEVTCVVVDVSHEDPEVKFNWYVDGVEVHNAKTKPREEQYNSTYRVVSVLTVLHQDWLNGKEYKCKVSNKALPAPIEKTISKAKGQPREPQVYTLPPSRDELTKNQVSLTCLVKGFYPSDIAVEWESNGQPENNYKTTPPVLDSDGSFFLYSKLTVDKSRWQQGNVFSCSVMHEALHNHYTQKSLSLSPG

SEQ ID NO: 157 - protein, 436 aa, Artificial Sequence
  Synthetic polypeptide
NITARIGEPLVLKCKGAPKKPPQRLEWKLNTGRTEAWKVLSPQGGGPWDSVARVLPNGSLFLPAVGIQDEGIFRCQAMNRNGKETKSNYRVRVYQIPGKPEIVDSASELTAGVPNKVGTCVSEGSYPAGTLSWHLDGKPLVPNEKGVSVKEQTRRHPETGLFTLQSELMVTPARGGDPRPTFSCSFSPGLPRHRALATAPIQPRVWEPVPLEEVQLVVEPEGGAVAPPSVFLFPPKPKDTLMISRTPEVTCVVVDVSHEDPEVKFNWYVDGVEVHNAKTKPREEQYNSTYRVVSVLTVLHQDWLNGKEYKCKVSNKALPAPIEKTISKAKGQPREPQVYTLPPSRDELTKNQVSLTCLVKGFYPSDIAVEWESNGQPENNYKTTPPVLDSDGSFFLYSKLTVDKSRWQQGNVFSCSVMHEALHNHYTQKSLSLSPG

SEQ ID NO: 158 - protein, 436 aa, Artificial Sequence
  Synthetic polypeptide
NITARIGEPLVLKCKGAPKKPPQRLEWKLNTGRTEAWKVLSPQGGGPWDSVARVLPNGSLFLPAVGIQDEGIFRCQAMNRNGKETKSNYRVRVYQIPGKPEIVDSASELTAGVPNKVGTCVSEGSYPAGTLSWHLDGKPLVPNEKGVSVKEQTRRHPETGLFTLQSELMVTPARGGDPRPTFSCSFSPGLPRHRALKTAPIQPRVWEPVPLEEVQLVVEPEGGAVAPPSVFLFPPKPKDTLMISRTPEVTCVVVDVSHEDPEVKFNWYVDGVEVHNAKTKPREEQYNSTYRVVSVLTVLHQDWLNGKEYKCKVSNKALPAPIEKTISKAKGQPREPQVYTLPPSRDELTKNQVSLTCLVKGFYPSDIAVEWESNGQPENNYKTTPPVLDSDGSFFLYSKLTVDKSRWQQGNVFSCSVMHEALHNHYTQKSLSLSPG

SEQ ID NO: 159 - protein, 436 aa, Artificial Sequence
  Synthetic polypeptide
NITARIGEPLVLKCKGAPKKPPQRLEWKLNTGRTEAWKVLSPQGGGPWDSVARVLPNGSLFLPAVGIQDEGIFRCQAMNRNGKETKSNYRVRVYQIPGKPEIVDSASELTAGVPNKVGTCVSEGSYPAGTLSWHLDGKPLVPNEKGVSVKEQTRRHPETGLFTLQSELMVTPARGGDPRPTFSCSFSPGLPRHRALHTAPIQPRVWEPVPLEEVQLVVEPEGGAVAPPSVFLFPPKPKDTLMISRTPEVTCVVVDVSHEDPEVKFNWYVDGVEVHNAKTKPREEQYNSTYRVVSVLTVLHQDWLNGKEYKCKVSNKALPAPIEKTISKAKGQPREPQVYTLPPSRDELTKNQVSLTCLVKGFYPSDIAVEWESNGQPENNYKTTPPVLDSDGSFFLYSKLTVDKSRWQQGNVFSCSVMHEALHNHYTQKSLSLSPG

SEQ ID NO: 160 - protein, 436 aa, Artificial Sequence
  Synthetic polypeptide
NITARIGEPLVLKCKGAPKKPPQRLEWKLNTGRTEAWKVLSPQGGGPWDSVARVLPNGSLFLPAVGIQDEGIFRCQAMNRNGKETKSNYRVRVYQIPGKPEIVDSASELTAGVPNKVGTCVSEGSYPAGTLSWHLDGKPLVPNEKGVSVKEQTRRHPETGLFTLQSELMVTPARGGDPRPTFSCSFSPGLPRHRALTTAPIQPRVWEPVPLEEVQLVVEPEGGAVAPPSVFLFPPKPKDTLMISRTPEVTCVVVDVSHEDPEVKFNWYVDGVEVHNAKTKPREEQYNSTYRVVSVLTVLHQDWLNGKEYKCKVSNKALPAPIEKTISKAKGQPREPQVYTLPPSRDELTKNQVSLTCLVKGFYPSDIAVEWESNGQPENNYKTTPPVLDSDGSFFLYSKLTVDKSRWQQGNVFSCSVMHEALHNHYTQKSLSLSPG

SEQ ID NO: 161 - protein, 436 aa, Artificial Sequence
  Synthetic polypeptide
QITARIGEPLVLKCKGAPKKPPQRLEWKLNTGRTEAWKVLSPQGGGPWDSVARVLPNGSLFLPAVGIQDEGIFRCQAMNRNGKETKSNYRVRVYQIPGKPEIVDSASELTAGVPNKVGTCVSEGSYPAGTLSWHLDGKPLVPNEKGVSVKEQTRRHPETGLFTLQSELMVTPARGGDPRPTFSCSFSPGLPRHRALATAPIQPRVWEPVPLEEVQLVVEPEGGAVAPPSVFLFPPKPKDTLMISRTPEVTCVVVDVSHEDPEVKFNWYVDGVEVHNAKTKPREEQYNSTYRVVSVLTVLHQDWLNGKEYKCKVSNKALPAPIEKTISKAKGQPREPQVYTLPPSRDELTKNQVSLTCLVKGFYPSDIAVEWESNGQPENNYKTTPPVLDSDGSFFLYSKLTVDKSRWQQGNVFSCSVMHEALHNHYTQKSLSLSPG

SEQ ID NO: 162 - protein, 436 aa, Artificial Sequence
  Synthetic polypeptide
NITARIGEPLVLKCKGAPKKPPQRLEWKLNTGRTEAWKVLSPQGGGPWDSVARVLPQGSLFLPAVGIQDEGIFRCQAMNRNGKETKSNYRVRVYQIPGKPEIVDSASELTAGVPNKVGTCVSEGSYPAGTLSWHLDGKPLVPNEKGVSVKEQTRRHPETGLFTLQSELMVTPARGGDPRPTFSCSFSPGLPRHRALATAPIQPRVWEPVPLEEVQLVVEPEGGAVAPPSVFLFPPKPKDTLMISRTPEVTCVVVDVSHEDPEVKFNWYVDGVEVHNAKTKPREEQYNSTYRVVSVLTVLHQDWLNGKEYKCKVSNKALPAPIEKTISKAKGQPREPQVYTLPPSRDELTKNQVSLTCLVKGFYPSDIAVEWESNGQPENNYKTTPPVLDSDGSFFLYSKLTVDKSRWQQGNVFSCSVMHEALHNHYTQKSLSLSPG

SEQ ID NO: 163 - protein, 436 aa, Artificial Sequence
  Synthetic polypeptide
QITARIGEPLVLKCKGAPKKPPQRLEWKLNTGRTEAWKVLSPQGGGPWDSVARVLPQGSLFLPAVGIQDEGIFRCQAMNRNGKETKSNYRVRVYQIPGKPEIVDSASELTAGVPNKVGTCVSEGSYPAGTLSWHLDGKPLVPNEKGVSVKEQTRRHPETGLFTLQSELMVTPARGGDPRPTFSCSFSPGLPRHRALATAPIQPRVWEPVPLEEVQLVVEPEGGAVAPPSVFLFPPKPKDTLMISRTPEVTCVVVDVSHEDPEVKFNWYVDGVEVHNAKTKPREEQYNSTYRVVSVLTVLHQDWLNGKEYKCKVSNKALPAPIEKTISKAKGQPREPQVYTLPPSRDELTKNQVSLTCLVKGFYPSDIAVEWESNGQPENNYKTTPPVLDSDGSFFLYSKLTVDKSRWQQGNVFSCSVMHEALHNHYTQKSLSLSPG

SEQ ID NO: 164 - protein, 436 aa, Artificial Sequence
  Synthetic polypeptide
NITARIGEPLVLKCKGAPKKPPQRLEWKLNTGRTEAWKVLSPQGGGPWDSVARVLPNGSLFLPAVGIQDEGIFRCQAMNRNGKETKSNYRVRVYQIPGKPEIVDSASELTAGVPNKVGTCVSEGSYPAGTLSWHLDGKPLVPNEKGVSVKEQTRRHPETGLFTLQSELMVTPARGGDPRPTFSCSFSPGLPRHRALRTAPIQPRVWEPVPLEEVQLVVEPEGGAVAPPSVFLFPPKPKDTLMISRTPEVTCVVVDVSHEDPEVKFNWYVDGVEVHNAKTKPREEQYQSTYRVVSVLTVLHQDWLNGKEYKCKVSNKALPAPIEKTISKAKGQPREPQVYTLPPSRDELTKNQVSLTCLVKGFYPSDIAVEWESNGQPENNYKTTPPVLDSDGSFFLYSKLTVDKSRWQQGNVFSCSVMHEALHNHYTQKSLSLSPG

SEQ ID NO: 165 - protein, 436 aa, Artificial Sequence
  Synthetic polypeptide
QITARIGEPLVLKCKGAPKKPPQRLEWKLNTGRTEAWKVLSPQGGGPWDSVARVLPNGSLFLPAVGIQDEGIFRCQAMNRNGKETKSNYRVRVYQIPGKPEIVDSASELTAGVPNKVGTCVSEGSYPAGTLSWHLDGKPLVPNEKGVSVKEQTRRHPETGLFTLQSELMVTPARGGDPRPTFSCSFSPGLPRHRALRTAPIQPRVWEPVPLEEVQLVVEPEGGAVAPPSVFLFPPKPKDTLMISRTPEVTCVVVDVSHEDPEVKFNWYVDGVEVHNAKTKPREEQYQSTYRVVSVLTVLHQDWLNGKEYKCKVSNKALPAPIEKTISKAKGQPREPQVYTLPPSRDELTKNQVSLTCLVKGFYPSDIAVEWESNGQPENNYKTTPPVLDSDGSFFLYSKLTVDKSRWQQGNVFSCSVMHEALHNHYTQKSLSLSPG

SEQ ID NO: 166 - protein, 437 aa, Artificial Sequence; identical to SEQ ID NO: 146
  Synthetic polypeptide

SEQ ID NO: 167 - protein, 436 aa, Artificial Sequence
  Synthetic polypeptide
QITARIGEPLVLKCKGAPKKPPQRLEWKLNTGRTEAWKVLSPQGGGPWDSVARVLPQGSLFLPAVGIQDEGIFRCQAMNRNGKETKSNYRVRVYQIPGKPEIVDSASELTAGVPNKVGTCVSEGSYPAGTLSWHLDGKPLVPNEKGVSVKEQTRRHPETGLFTLQSELMVTPARGGDPRPTFSCSFSPGLPRHRALRTAPIQPRVWEPVPLEEVQLVVEPEGGAVAPPSVFLFPPKPKDTLMISRTPEVTCVVVDVSHEDPEVKFNWYVDGVEVHNAKTKPREEQYQSTYRVVSVLTVLHQDWLNGKEYKCKVSNKALPAPIEKTISKAKGQPREPQVYTLPPSRDELTKNQVSLTCLVKGFYPSDIAVEWESNGQPENNYKTTPPVLDSDGSFFLYSKLTVDKSRWQQGNVFSCSVMHEALHNHYTQKSLSLSPG

SEQ ID NO: 168 - protein, 436 aa, Artificial Sequence
  Synthetic polypeptide
QITARIGEPLVLKCKGAPKKPPQRLEWKLNTGRTEAWKVLSPQGGGPWDSVARVLPNGSLFLPAVGIQDEGIFRCQAMNRNGKETKSNYRVRVYQIPGKPEIVDSASELTAGVPNKVGTCVSEGSYPAGTLSWHLDGKPLVPNEKGVSVKEQTRRHPETGLFTLQSELMVTPARGGDPRPTFSCSFSPGLPRHRALATAPIQPRVWEPVPLEEVQLVVEPEGGAVAPPSVFLFPPKPKDTLMISRTPEVTCVVVDVSHEDPEVKFNWYVDGVEVHNAKTKPREEQYQSTYRVVSVLTVLHQDWLNGKEYKCKVSNKALPAPIEKTISKAKGQPREPQVYTLPPSRDELTKNQVSLTCLVKGFYPSDIAVEWESNGQPENNYKTTPPVLDSDGSFFLYSKLTVDKSRWQQGNVFSCSVMHEALHNHYTQKSLSLSPG

SEQ ID NO: 169 - protein, 436 aa, Artificial Sequence
  Synthetic polypeptide
NITARIGEPLVLKCKGAPKKPPQRLEWKLNTGRTEAWKVLSPQGGGPWDSVARVLPQGSLFLPAVGIQDEGIFRCQAMNRNGKETKSNYRVRVYQIPGKPEIVDSASELTAGVPNKVGTCVSEGSYPAGTLSWHLDGKPLVPNEKGVSVKEQTRRHPETGLFTLQSELMVTPARGGDPRPTFSCSFSPGLPRHRALATAPIQPRVWEPVPLEEVQLVVEPEGGAVAPPSVFLFPPKPKDTLMISRTPEVTCVVVDVSHEDPEVKFNWYVDGVEVHNAKTKPREEQYQSTYRVVSVLTVLHQDWLNGKEYKCKVSNKALPAPIEKTISKAKGQPREPQVYTLPPSRDELTKNQVSLTCLVKGFYPSDIAVEWESNGQPENNYKTTPPVLDSDGSFFLYSKLTVDKSRWQQGNVFSCSVMHEALHNHYTQKSLSLSPG

SEQ ID NO: 170 - protein, 436 aa, Artificial Sequence
  Synthetic polypeptide
QITARIGEPLVLKCKGAPKKPPQRLEWKLNTGRTEAWKVLSPQGGGPWDSVARVLPQGSLFLPAVGIQDEGIFRCQAMNRNGKETKSNYRVRVYQIPGKPEIVDSASELTAGVPNKVGTCVSEGSYPAGTLSWHLDGKPLVPNEKGVSVKEQTRRHPETGLFTLQSELMVTPARGGDPRPTFSCSFSPGLPRHRALATAPIQPRVWEPVPLEEVQLVVEPEGGAVAPPSVFLFPPKPKDTLMISRTPEVTCVVVDVSHEDPEVKFNWYVDGVEVHNAKTKPREEQYQSTYRVVSVLTVLHQDWLNGKEYKCKVSNKALPAPIEKTISKAKGQPREPQVYTLPPSRDELTKNQVSLTCLVKGFYPSDIAVEWESNGQPENNYKTTPPVLDSDGSFFLYSKLTVDKSRWQQGNVFSCSVMHEALHNHYTQKSLSLSPG

SEQ ID NO: 171 - protein, 436 aa, Artificial Sequence
  Synthetic polypeptide
NITARIGEPLVLKCKGAPKKPPQRLEWKLNTGRTEAWKVLSPQGGGPWDSVARVLPNSSLFLPAVGIQDEGIFRCQAMNRNGKETKSNYRVRVYQIPGKPEIVDSASELTAGVPNKVGTCVSEGSYPAGTLSWHLDGKPLVPNEKGVSVKEQTRRHPETGLFTLQSELMVTPARGGDPRPTFSCSFSPGLPRHRALATAPIQPRVWEPVPLEEVQLVVEPEGGAVAPPSVFLFPPKPKDTLMISRTPEVTCVVVDVSHEDPEVKFNWYVDGVEVHNAKTKPREEQYNSTYRVVSVLTVLHQDWLNGKEYKCKVSNKALPAPIEKTISKAKGQPREPQVYTLPPSRDELTKNQVSLTCLVKGFYPSDIAVEWESNGQPENNYKTTPPVLDSDGSFFLYSKLTVDKSRWQQGNVFSCSVMHEALHNHYTQKSLSLSPG

SEQ ID NO: 172 - protein, 437 aa, Artificial
  Synthetic polypeptide
  MISC_FEATURE (1)..(1): Xaa = pyroglutamic acid
XQITARIGEPLVLKCKGAPKKPPQRLEWKLNTGRTEAWKVLSPQGGGPWDSVARVLPNGSLFLPAVGIQDEGIFRCQAMNRNGKETKSNYRVRVYQIPGKPEIVDSASELTAGVPNKVGTCVSEGSYPAGTLSWHLDGKPLVPNEKGVSVKEQTRRHPETGLFTLQSELMVTPARGGDPRPTFSCSFSPGLPRHRALRTAPIQPRVWEPVPLEEVQLVVEPEGGAVAPPSVFLFPPKPKDTLMISRTPEVTCVVVDVSHEDPEVKFNWYVDGVEVHNAKTKPREEQYNSTYRVVSVLTVLHQDWLNGKEYKCKVSNKALPAPIEKTISKAKGQPREPQVYTLPPSRDELTKNQVSLTCLVKGFYPSDIAVEWESNGQPENNYKTTPPVLDSDGSFFLYSKLTVDKSRWQQGNVFSCSVMHEALHNHYTQKSLSLSPG

SEQ ID NO: 173 - protein, 437 aa, Artificial Sequence
  Synthetic polypeptide
  MISC_FEATURE (1)..(1): Xaa = pyroglutamic acid
XNITARIGEPLVLKCKGAPKKPPQRLEWKLNTGRTEAWKVLSPQGGGPWDSVARVLPQGSLFLPAVGIQDEGIFRCQAMNRNGKETKSNYRVRVYQIPGKPEIVDSASELTAGVPNKVGTCVSEGSYPAGTLSWHLDGKPLVPNEKGVSVKEQTRRHPETGLFTLQSELMVTPARGGDPRPTFSCSFSPGLPRHRALRTAPIQPRVWEPVPLEEVQLVVEPEGGAVAPPSVFLFPPKPKDTLMISRTPEVTCVVVDVSHEDPEVKFNWYVDGVEVHNAKTKPREEQYNSTYRVVSVLTVLHQDWLNGKEYKCKVSNKALPAPIEKTISKAKGQPREPQVYTLPPSRDELTKNQVSLTCLVKGFYPSDIAVEWESNGQPENNYKTTPPVLDSDGSFFLYSKLTVDKSRWQQGNVFSCSVMHEALHNHYTQKSLSLSPG

SEQ ID NO: 174 - protein, 437 aa, Artificial Sequence
  Synthetic polypeptide
  MISC_FEATURE (1)..(1): Xaa = pyroglutamic acid
XQITARIGEPLVLKCKGAPKKPPQRLEWKLNTGRTEAWKVLSPQGGGPWDSVARVLPQGSLFLPAVGIQDEGIFRCQAMNRNGKETKSNYRVRVYQIPGKPEIVDSASELTAGVPNKVGTCVSEGSYPAGTLSWHLDGKPLVPNEKGVSVKEQTRRHPETGLFTLQSELMVTPARGGDPRPTFSCSFSPGLPRHRALRTAPIQPRVWEPVPLEEVQLVVEPEGGAVAPPSVFLFPPKPKDTLMISRTPEVTCVVVDVSHEDPEVKFNWYVDGVEVHNAKTKPREEQYNSTYRVVSVLTVLHQDWLNGKEYKCKVSNKALPAPIEKTISKAKGQPREPQVYTLPPSRDELTKNQVSLTCLVKGFYPSDIAVEWESNGQPENNYKTTPPVLDSDGSFFLYSKLTVDKSRWQQGNVFSCSVMHEALHNHYTQKSLSLSPG

SEQ ID NO: 175 - protein, 437 aa, Artificial Sequence
  Synthetic polypeptide
  MISC_FEATURE (1)..(1): Xaa = pyroglutamic acid
XNITARIGEPLVLKCKGAPKKPPQRLEWKLNTGRTEAWKVLSPQGGGPWDSVARVLPNGSLFLPAVGIQDEGIFRCQAMNRNGKETKSNYRVRVYQIPGKPEIVDSASELTAGVPNKVGTCVSEGSYPAGTLSWHLDGKPLVPNEKGVSVKEQTRRHPETGLFTLQSELMVTPARGGDPRPTFSCSFSPGLPRHAALRTAPIQPRVWEPVPLEEVQLVVEPEGGAVAPPSVFLFPPKPKDTLMISRTPEVTCVVVDVSHEDPEVKFNWYVDGVEVHNAKTKPREEQYNSTYRVVSVLTVLHQDWLNGKEYKCKVSNKALPAPIEKTISKAKGQPREPQVYTLPPSRDELTKNQVSLTCLVKGFYPSDIAVEWESNGQPENNYKTTPPVLDSDGSFFLYSKLTVDKSRWQQGNVFSCSVMHEALHNHYTQKSLSLSPG

SEQ ID NO: 176 - protein, 437 aa, Artificial Sequence
  Synthetic polypeptide
  MISC_FEATURE (1)..(1): Xaa = pyroglutamic acid
XNITARIGEPLVLKCKGAPKKPPQRLEWKLNTGRTEAWKVLSPQGGGPWDSVARVLPNGSLFLPAVGIQDEGIFRCQAMNRNGKETKSNYRVRVYQIPGKPEIVDSASELTAGVPNKVGTCVSEGSYPAGTLSWHLDGKPLVPNEKGVSVKEQTRRHPETGLFTLQSELMVTPARGGDPRPTFSCSFSPGLPRHKALRTAPIQPRVWEPVPLEEVQLVVEPEGGAVAPPSVFLFPPKPKDTLMISRTPEVTCVVVDVSHEDPEVKFNWYVDGVEVHNAKTKPREEQYNSTYRVVSVLTVLHQDWLNGKEYKCKVSNKALPAPIEKTISKAKGQPREPQVYTLPPSRDELTKNQVSLTCLVKGFYPSDIAVEWESNGQPENNYKTTPPVLDSDGSFFLYSKLTVDKSRWQQGNVFSCSVMHEALHNHYTQKSLSLSPG

SEQ ID NO: 177 - protein, 437 aa, Artificial Sequence
  Synthetic polypeptide
  MISC_FEATURE (1)..(1): Xaa = pyroglutamic acid
XNITARIGEPLVLKCKGAPKKPPQRLEWKLNTGRTEAWKVLSPQGGGPWDSVARVLPNGSLFLPAVGIQDEGIFRCQAMNRNGKETKSNYRVRVYQIPGKPEIVDSASELTAGVPNKVGTCVSEGSYPAGTLSWHLDGKPLVPNEKGVSVKEQTRRHPETGLFTLQSELMVTPARGGDPRPTFSCSFSPGLPRHRALATAPIQPRVWEPVPLEEVQLVVEPEGGAVAPPSVFLFPPKPKDTLMISRTPEVTCVVVDVSHEDPEVKFNWYVDGVEVHNAKTKPREEQYNSTYRVVSVLTVLHQDWLNGKEYKCKVSNKALPAPIEKTISKAKGQPREPQVYTLPPSRDELTKNQVSLTCLVKGFYPSDIAVEWESNGQPENNYKTTPPVLDSDGSFFLYSKLTVDKSRWQQGNVFSCSVMHEALHNHYTQKSLSLSPG

SEQ ID NO: 178 - protein, 437 aa, Artificial Sequence
  Synthetic polypeptide
  MISC_FEATURE (1)..(1): Xaa = pyroglutamic acid
XNITARIGEPLVLKCKGAPKKPPQRLEWKLNTGRTEAWKVLSPQGGGPWDSVARVLPNGSLFLPAVGIQDEGIFRCQAMNRNGKETKSNYRVRVYQIPGKPEIVDSASELTAGVPNKVGTCVSEGSYPAGTLSWHLDGKPLVPNEKGVSVKEQTRRHPETGLFTLQSELMVTPARGGDPRPTFSCSFSPGLPRHRALKTAPIQPRVWEPVPLEEVQLVVEPEGGAVAPPSVFLFPPKPKDTLMISRTPEVTCVVVDVSHEDPEVKFNWYVDGVEVHNAKTKPREEQYNSTYRVVSVLTVLHQDWLNGKEYKCKVSNKALPAPIEKTISKAKGQPREPQVYTLPPSRDELTKNQVSLTCLVKGFYPSDIAVEWESNGQPENNYKTTPPVLDSDGSFFLYSKLTVDKSRWQQGNVFSCSVMHEALHNHYTQKSLSLSPG

SEQ ID NO: 179 - protein, 437 aa, Artificial Sequence
  Synthetic polypeptide
  MISC_FEATURE (1)..(1): Xaa = pyroglutamic acid
XNITARIGEPLVLKCKGAPKKPPQRLEWKLNTGRTEAWKVLSPQGGGPWDSVARVLPNGSLFLPAVGIQDEGIFRCQAMNRNGKETKSNYRVRVYQIPGKPEIVDSASELTAGVPNKVGTCVSEGSYPAGTLSWHLDGKPLVPNEKGVSVKEQTRRHPETGLFTLQSELMVTPARGGDPRPTFSCSFSPGLPRHRALHTAPIQPRVWEPVPLEEVQLVVEPEGGAVAPPSVFLFPPKPKDTLMISRTPEVTCVVVDVSHEDPEVKFNWYVDGVEVHNAKTKPREEQYNSTYRVVSVLTVLHQDWLNGKEYKCKVSNKALPAPIEKTISKAKGQPREPQVYTLPPSRDELTKNQVSLTCLVKGFYPSDIAVEWESNGQPENNYKTTPPVLDSDGSFFLYSKLTVDKSRWQQGNVFSCSVMHEALHNHYTQKSLSLSPG

SEQ ID NO: 180 - protein, 437 aa, Artificial Sequence
  Synthetic polypeptide
  MISC_FEATURE (1)..(1): Xaa = pyroglutamic acid
XNITARIGEPLVLKCKGAPKKPPQRLEWKLNTGRTEAWKVLSPQGGGPWDSVARVLPNGSLFLPAVGIQDEGIFRCQAMNRNGKETKSNYRVRVYQIPGKPEIVDSASELTAGVPNKVGTCVSEGSYPAGTLSWHLDGKPLVPNEKGVSVKEQTRRHPETGLFTLQSELMVTPARGGDPRPTFSCSFSPGLPRHRALTTAPIQPRVWEPVPLEEVQLVVEPEGGAVAPPSVFLFPPKPKDTLMISRTPEVTCVVVDVSHEDPEVKFNWYVDGVEVHNAKTKPREEQYNSTYRVVSVLTVLHQDWLNGKEYKCKVSNKALPAPIEKTISKAKGQPREPQVYTLPPSRDELTKNQVSLTCLVKGFYPSDIAVEWESNGQPENNYKTTPPVLDSDGSFFLYSKLTVDKSRWQQGNVFSCSVMHEALHNHYTQKSLSLSPG

SEQ ID NO: 181 - protein, 437 aa, Artificial Sequence
  Synthetic polypeptide
  MISC_FEATURE (1)..(1): Xaa = pyroglutamic acid
XQITARIGEPLVLKCKGAPKKPPQRLEWKLNTGRTEAWKVLSPQGGGPWDSVARVLPNGSLFLPAVGIQDEGIFRCQAMNRNGKETKSNYRVRVYQIPGKPEIVDSASELTAGVPNKVGTCVSEGSYPAGTLSWHLDGKPLVPNEKGVSVKEQTRRHPETGLFTLQSELMVTPARGGDPRPTFSCSFSPGLPRHRALATAPIQPRVWEPVPLEEVQLVVEPEGGAVAPPSVFLFPPKPKDTLMISRTPEVTCVVVDVSHEDPEVKFNWYVDGVEVHNAKTKPREEQYNSTYRVVSVLTVLHQDWLNGKEYKCKVSNKALPAPIEKTISKAKGQPREPQVYTLPPSRDELTKNQVSLTCLVKGFYPSDIAVEWESNGQPENNYKTTPPVLDSDGSFFLYSKLTVDKSRWQQGNVFSCSVMHEALHNHYTQKSLSLSPG

SEQ ID NO: 182 - protein, 437 aa, Artificial Sequence
  Synthetic polypeptide
  MISC_FEATURE (1)..(1): Xaa = pyroglutamic acid
XNITARIGEPLVLKCKGAPKKPPQRLEWKLNTGRTEAWKVLSPQGGGPWDSVARVLPQGSLFLPAVGIQDEGIFRCQAMNRNGKETKSNYRVRVYQIPGKPEIVDSASELTAGVPNKVGTCVSEGSYPAGTLSWHLDGKPLVPNEKGVSVKEQTRRHPETGLFTLQSELMVTPARGGDPRPTFSCSFSPGLPRHRALATAPIQPRVWEPVPLEEVQLVVEPEGGAVAPPSVFLFPPKPKDTLMISRTPEVTCVVVDVSHEDPEVKFNWYVDGVEVHNAKTKPREEQYNSTYRVVSVLTVLHQDWLNGKEYKCKVSNKALPAPIEKTISKAKGQPREPQVYTLPPSRDELTKNQVSLTCLVKGFYPSDIAVEWESNGQPENNYKTTPPVLDSDGSFFLYSKLTVDKSRWQQGNVFSCSVMHEALHNHYTQKSLSLSPG

SEQ ID NO: 183 - protein, 437 aa, Artificial Sequence
  Synthetic polypeptide
  MISC_FEATURE (1)..(1): Xaa = pyroglutamic acid
XQITARIGEPLVLKCKGAPKKPPQRLEWKLNTGRTEAWKVLSPQGGGPWDSVARVLPQGSLFLPAVGIQDEGIFRCQAMNRNGKETKSNYRVRVYQIPGKPEIVDSASELTAGVPNKVGTCVSEGSYPAGTLSWHLDGKPLVPNEKGVSVKEQTRRHPETGLFTLQSELMVTPARGGDPRPTFSCSFSPGLPRHRALATAPIQPRVWEPVPLEEVQLVVEPEGGAVAPPSVFLFPPKPKDTLMISRTPEVTCVVVDVSHEDPEVKFNWYVDGVEVHNAKTKPREEQYNSTYRVVSVLTVLHQDWLNGKEYKCKVSNKALPAPIEKTISKAKGQPREPQVYTLPPSRDELTKNQVSLTCLVKGFYPSDIAVEWESNGQPENNYKTTPPVLDSDGSFFLYSKLTVDKSRWQQGNVFSCSVMHEALHNHYTQKSLSLSPG

SEQ ID NO: 184 - protein, 437 aa, Artificial Sequence
  Synthetic polypeptide
  MISC_FEATURE (1)..(1): Xaa = pyroglutamic acid
XNITARIGEPLVLKCKGAPKKPPQRLEWKLNTGRTEAWKVLSPQGGGPWDSVARVLPNGSLFLPAVGIQDEGIFRCQAMNRNGKETKSNYRVRVYQIPGKPEIVDSASELTAGVPNKVGTCVSEGSYPAGTLSWHLDGKPLVPNEKGVSVKEQTRRHPETGLFTLQSELMVTPARGGDPRPTFSCSFSPGLPRHRALRTAPIQPRVWEPVPLEEVQLVVEPEGGAVAPPSVFLFPPKPKDTLMISRTPEVTCVVVDVSHEDPEVKFNWYVDGVEVHNAKTKPREEQYQSTYRVVSVLTVLHQDWLNGKEYKCKVSNKALPAPIEKTISKAKGQPREPQVYTLPPSRDELTKNQVSLTCLVKGFYPSDIAVEWESNGQPENNYKTTPPVLDSDGSFFLYSKLTVDKSRWQQGNVFSCSVMHEALHNHYTQKSLSLSPG

SEQ ID NO: 185 - protein, 437 aa, Artificial Sequence
  Synthetic polypeptide
  MISC_FEATURE (1)..(1): Xaa = pyroglutamic acid
XQITARIGEPLVLKCKGAPKKPPQRLEWKLNTGRTEAWKVLSPQGGGPWDSVARVLPNGSLFLPAVGIQDEGIFRCQAMNRNGKETKSNYRVRVYQIPGKPEIVDSASELTAGVPNKVGTCVSEGSYPAGTLSWHLDGKPLVPNEKGVSVKEQTRRHPETGLFTLQSELMVTPARGGDPRPTFSCSFSPGLPRHRALRTAPIQPRVWEPVPLEEVQLVVEPEGGAVAPPSVFLFPPKPKDTLMISRTPEVTCVVVDVSHEDPEVKFNWYVDGVEVHNAKTKPREEQYQSTYRVVSVLTVLHQDWLNGKEYKCKVSNKALPAPIEKTISKAKGQPREPQVYTLPPSRDELTKNQVSLTCLVKGFYPSDIAVEWESNGQPENNYKTTPPVLDSDGSFFLYSKLTVDKSRWQQGNVFSCSVMHEALHNHYTQKSLSLSPG

SEQ ID NO: 186 - protein, 437 aa, Artificial Sequence
  Synthetic polypeptide
  MISC_FEATURE (1)..(1): Xaa = pyroglutamic acid
XNITARIGEPLVLKCKGAPKKPPQRLEWKLNTGRTEAWKVLSPQGGGPWDSVARVLPQGSLFLPAVGIQDEGIFRCQAMNRNGKETKSNYRVRVYQIPGKPEIVDSASELTAGVPNKVGTCVSEGSYPAGTLSWHLDGKPLVPNEKGVSVKEQTRRHPETGLFTLQSELMVTPARGGDPRPTFSCSFSPGLPRHRALRTAPIQPRVWEPVPLEEVQLVVEPEGGAVAPPSVFLFPPKPKDTLMISRTPEVTCVVVDVSHEDPEVKFNWYVDGVEVHNAKTKPREEQYQSTYRVVSVLTVLHQDWLNGKEYKCKVSNKALPAPIEKTISKAKGQPREPQVYTLPPSRDELTKNQVSLTCLVKGFYPSDIAVEWESNGQPENNYKTTPPVLDSDGSFFLYSKLTVDKSRWQQGNVFSCSVMHEALHNHYTQKSLSLSPG

SEQ ID NO: 187 - protein, 437 aa, Artificial Sequence
  Synthetic polypeptide
  MISC_FEATURE (1)..(1): Xaa = pyroglutamic acid
XQITARIGEPLVLKCKGAPKKPPQRLEWKLNTGRTEAWKVLSPQGGGPWDSVARVLPQGSLFLPAVGIQDEGIFRCQAMNRNGKETKSNYRVRVYQIPGKPEIVDSASELTAGVPNKVGTCVSEGSYPAGTLSWHLDGKPLVPNEKGVSVKEQTRRHPETGLFTLQSELMVTPARGGDPRPTFSCSFSPGLPRHRALRTAPIQPRVWEPVPLEEVQLVVEPEGGAVAPPSVFLFPPKPKDTLMISRTPEVTCVVVDVSHEDPEVKFNWYVDGVEVHNAKTKPREEQYQSTYRVVSVLTVLHQDWLNGKEYKCKVSNKALPAPIEKTISKAKGQPREPQVYTLPPSRDELTKNQVSLTCLVKGFYPSDIAVEWESNGQPENNYKTTPPVLDSDGSFFLYSKLTVDKSRWQQGNVFSCSVMHEALHNHYTQKSLSLSPG

SEQ ID NO: 188 - protein, 437 aa, Artificial Sequence
  Synthetic polypeptide
  MISC_FEATURE (1)..(1): Xaa = pyroglutamic acid
XQITARIGEPLVLKCKGAPKKPPQRLEWKLNTGRTEAWKVLSPQGGGPWDSVARVLPNGSLFLPAVGIQDEGIFRCQAMNRNGKETKSNYRVRVYQIPGKPEIVDSASELTAGVPNKVGTCVSEGSYPAGTLSWHLDGKPLVPNEKGVSVKEQTRRHPETGLFTLQSELMVTPARGGDPRPTFSCSFSPGLPRHRALATAPIQPRVWEPVPLEEVQLVVEPEGGAVAPPSVFLFPPKPKDTLMISRTPEVTCVVVDVSHEDPEVKFNWYVDGVEVHNAKTKPREEQYQSTYRVVSVLTVLHQDWLNGKEYKCKVSNKALPAPIEKTISKAKGQPREPQVYTLPPSRDELTKNQVSLTCLVKGFYPSDIAVEWESNGQPENNYKTTPPVLDSDGSFFLYSKLTVDKSRWQQGNVFSCSVMHEALHNHYTQKSLSLSPG

SEQ ID NO: 189 - protein, 437 aa, Artificial Sequence
  Synthetic polypeptide
  MISC_FEATURE (1)..(1): Xaa = pyroglutamic acid
XNITARIGEPLVLKCKGAPKKPPQRLEWKLNTGRTEAWKVLSPQGGGPWDSVARVLPQGSLFLPAVGIQDEGIFRCQAMNRNGKETKSNYRVRVYQIPGKPEIVDSASELTAGVPNKVGTCVSEGSYPAGTLSWHLDGKPLVPNEKGVSVKEQTRRHPETGLFTLQSELMVTPARGGDPRPTFSCSFSPGLPRHRALATAPIQPRVWEPVPLEEVQLVVEPEGGAVAPPSVFLFPPKPKDTLMISRTPEVTCVVVDVSHEDPEVKFNWYVDGVEVHNAKTKPREEQYQSTYRVVSVLTVLHQDWLNGKEYKCKVSNKALPAPIEKTISKAKGQPREPQVYTLPPSRDELTKNQVSLTCLVKGFYPSDIAVEWESNGQPENNYKTTPPVLDSDGSFFLYSKLTVDKSRWQQGNVFSCSVMHEALHNHYTQKSLSLSPG

SEQ ID NO: 190 - protein, 437 aa, Artificial Sequence
  Synthetic polypeptide
  MISC_FEATURE (1)..(1): Xaa = pyroglutamic acid
XQITARIGEPLVLKCKGAPKKPPQRLEWKLNTGRTEAWKVLSPQGGGPWDSVARVLPQGSLFLPAVGIQDEGIFRCQAMNRNGKETKSNYRVRVYQIPGKPEIVDSASELTAGVPNKVGTCVSEGSYPAGTLSWHLDGKPLVPNEKGVSVKEQTRRHPETGLFTLQSELMVTPARGGDPRPTFSCSFSPGLPRHRALATAPIQPRVWEPVPLEEVQLVVEPEGGAVAPPSVFLFPPKPKDTLMISRTPEVTCVVVDVSHEDPEVKFNWYVDGVEVHNAKTKPREEQYQSTYRVVSVLTVLHQDWLNGKEYKCKVSNKALPAPIEKTISKAKGQPREPQVYTLPPSRDELTKNQVSLTCLVKGFYPSDIAVEWESNGQPENNYKTTPPVLDSDGSFFLYSKLTVDKSRWQQGNVFSCSVMHEALHNHYTQKSLSLSPG

SEQ ID NO: 191 - protein, 93 aa, Artificial Sequence
  Synthetic polypeptide
  MISC_FEATURE (1)..(1): Xaa = pyroglutamic acid
XQITARIGEPLVLKCKGAPKKPPQRLEWKLNTGRTEAWKVLSPQGGGPWDSVARVLPNGSLFLPAVGIQDEGIFRCQAMNRNGKETKSNYRVR

SEQ ID NO: 192 - protein, 93 aa, Artificial Sequence
  Synthetic polypeptide
  MISC_FEATURE (1)..(1): Xaa = pyroglutamic acid
XQITARIGEPLVLKCKGAPKKPPQRLEWKLNTGRTEAWKVLSPQGGGPWDSVARVLPQGSLFLPAVGIQDEGIFRCQAMNRNGKETKSNYRVR

SEQ ID NO: 193 - protein, 93 aa, Artificial Sequence
  Synthetic polypeptide
  MISC_FEATURE (1)..(1): Xaa = pyroglutamic acid
XNITARIGEPLVLKCKGAPKKPPQRLEWKLNTGRTEAWKVLSPQGGGPWDSVARVLPQGSLFLPAVGIQDEGIFRCQAMNRNGKETKSNYRVR

SEQ ID NO: 194 - protein, 29 aa, Artificial Sequence
  Synthetic polypeptide
  MISC_FEATURE (1)..(1): Xaa = pyroglutamic acid
XQITARIGEPLVLKCKGAPKKPPQRLEWK

SEQ ID NO: 195 - protein, 28 aa, Artificial Sequence
  Synthetic polypeptide
QITARIGEPLVLKCKGAPKKPPQRLEWK

SEQ ID NO: 196 - DNA, 31 bp, Artificial Sequence
  Synthetic polynucleotide
gcctcgggaggaacagtacagtccacctacc

SEQ ID NO: 197 - DNA, 28 bp, Artificial Sequence
  Synthetic polynucleotide
tactgttcctcccgaggcttggtcttgg

SEQ ID NO: 198 - DNA, 33 bp, Artificial Sequence
  Synthetic polynucleotide
gcctcggcaccgggccctggcgaccgcccctat

SEQ ID NO: 199 - DNA, 30 bp, Artificial Sequence
  Synthetic polynucleotide
cagggcccggtgccgaggcaggccagggga

SEQ ID NO: 200 - protein, 437 aa, Artificial Sequence
  Synthetic polypeptide
  MISC_FEATURE (1)..(1): Xaa = pyroglutamic acid
XNITARIGEPLVLKCKGAPKKPPQRLEWKLNTGRTEAWKVLSPQGGGPWDSVARVLPNSSLFLPAVGIQDEGIFRCQAMNRNGKETKSNYRVRVYQIPGKPEIVDSASELTAGVPNKVGTCVSEGSYPAGTLSWHLDGKPLVPNEKGVSVKEQTRRHPETGLFTLQSELMVTPARGGDPRPTFSCSFSPGLPRHRALATAPIQPRVWEPVPLEEVQLVVEPEGGAVAPPSVFLFPPKPKDTLMISRTPEVTCVVVDVSHEDPEVKFNWYVDGVEVHNAKTKPREEQYNSTYRVVSVLTVLHQDWLNGKEYKCKVSNKALPAPIEKTISKAKGQPREPQVYTLPPSRDELTKNQVSLTCLVKGFYPSDIAVEWESNGQPENNYKTTPPVLDSDGSFFLYSKLTVDKSRWQQGNVFSCSVMHEALHNHYTQKSLSLSPG

SEQ ID NO: 201 - protein, 437 aa, Artificial Sequence
  Synthetic polypeptide
  MISC_FEATURE (1)..(1): Xaa = pyroglutamic acid
XQITARIGEPLVLKCKGAPKKPPQRLEWKLNTGRTEAWKVLSPQGGGPWDSVARVLPNSSLFLPAVGIQDEGIFRCQAMNRNGKETKSNYRVRVYQIPGKPEIVDSASELTAGVPNKVGTCVSEGSYPAGTLSWHLDGKPLVPNEKGVSVKEQTRRHPETGLFTLQSELMVTPARGGDPRPTFSCSFSPGLPRHRALATAPIQPRVWEPVPLEEVQLVVEPEGGAVAPPSVFLFPPKPKDTLMISRTPEVTCVVVDVSHEDPEVKFNWYVDGVEVHNAKTKPREEQYNSTYRVVSVLTVLHQDWLNGKEYKCKVSNKALPAPIEKTISKAKGQPREPQVYTLPPSRDELTKNQVSLTCLVKGFYPSDIAVEWESNGQPENNYKTTPPVLDSDGSFFLYSKLTVDKSRWQQGNVFSCSVMHEALHNHYTQKSLSLSPG

SEQ ID NO: 202 - DNA, 1386 bp, Artificial Sequence
  Synthetic polynucleotide
atggcagccggaacagcagttggagcctgggtgctggtcctcagtctgtggggcgctgtggtgggcgcccagcagatcaccgcccggatcggcgagcctctggtgctgaagtgcaagggcgctcctaagaagcctcctcagcggctcgagtggaagctgaacaccggccggaccgaggcctggaaggtgctgtctcctcagggcggaggaccttgggactccgtggcccgggtgctgcctaacggctccctgttcctgcctgccgtgggcatccaggacgagggcatcttcaggtgccaggccatgaaccggaacggcaaagaaaccaagtccaactacagagtgcgggtgtaccagatccctggcaagcctgagatcgtggactccgcctccgagctgaccgctggcgtgcctaacaaggtcggcacctgcgtgtccgagggctcctaccctgccggcaccctgtcctggcatctggacggcaagcccctggtgcctaacgagaagggcgtgtccgtgaaggaacagaccaggcggcaccctgagaccggcctgttcaccctgcagtccgagctgatggtgacccctgccagaggcggcgaccctcggcctaccttctcctgctccttctcccctggcctgcctcggcaccgggccctgcggaccgcccctatccagcctagagtgtgggagcctgtgcctctcgaggaagtgcagctggtcgtggagcctgagggcggagccgtggcccctccttccgtgttcctgttccctcctaagcctaaggacaccctgatgatctcccggacccctgaggtgacctgcgtggtggtggacgtgtcccacgaggatcctgaggtgaagttcaactggtacgtggacggcgtggaggtgcacaacgccaagaccaagcctcgggaggaacagtacaactccacctaccgggtggtgtccgtgctgaccgtgctgcaccaggactggctgaatggcaaagaatacaagtgcaaggtctccaacaaggccctgcctgcccctatcgagaaaaccatctccaaggccaagggccagcccagagagcctcaggtctacaccctgcctccctcccgggacgagctgaccaagaaccaggtgtccctgacctgcctggtgaagggcttctacccttccgacatcgccgtggagtgggagtccaacggccagcctgagaacaactacaagaccacccctcctgtgctggactccgacggctccttcttcctgtactccaagctgaccgtggacaagtcccggtggcagcagggcaacgtgttctcctgcagcgtgatgcacgaggccctgcacaaccactacacccagaagtccctgtccctgagccctggcaagtga

SEQ ID NO: 203 - DNA, 1386 bp, Artificial Sequence
  Synthetic polynucleotide
atggcagccggaacagcagttggagcctgggtgctggtcctcagtctgtggggcgctgtggtgggcgcccagaacatcaccgcccggatcggcgagcctctggtgctgaagtgcaagggcgctcctaagaagcctcctcagcggctcgagtggaagctgaacaccggccggaccgaggcctggaaggtgctgtctcctcagggcggaggaccttgggactccgtggcccgggtgctgcctcagggctccctgttcctgcctgccgtgggcatccaggacgagggcatcttcaggtgccaggccatgaaccggaacggcaaagaaaccaagtccaactacagagtgcgggtgtaccagatccctggcaagcctgagatcgtggactccgcctccgagctgaccgctggcgtgcctaacaaggtcggcacctgcgtgtccgagggctcctaccctgccggcaccctgtcctggcatctggacggcaagcccctggtgcctaacgagaagggcgtgtccgtgaaggaacagaccaggcggcaccctgagaccggcctgttcaccctgcagtccgagctgatggtgacccctgccagaggcggcgaccctcggcctaccttctcctgctccttctcccctggcctgcctcggcaccgggccctgcggaccgcccctatccagcctagagtgtgggagcctgtgcctctcgaggaagtgcagctggtcgtggagcctgagggcggagccgtggcccctccttccgtgttcctgttccctcctaagcctaaggacaccctgatgatctcccggacccctgaggtgacctgcgtggtggtggacgtgtcccacgaggatcctgaggtgaagttcaactggtacgtggacggcgtggaggtgcacaacgccaagaccaagcctcgggaggaacagtacaactccacctaccgggtggtgtccgtgctgaccgtgctgcaccaggactggctgaatggcaaagaatacaagtgcaaggtctccaacaaggccctgcctgcccctatcgagaaaaccatctccaaggccaagggccagcccagagagcctcaggtctacaccctgcctccctcccgggacgagctgaccaagaaccaggtgtccctgacctgcctggtgaagggcttctacccttccgacatcgccgtggagtgggagtccaacggccagcctgagaacaactacaagaccacccctcctgtgctggactccgacggctccttcttcctgtactccaagctgaccgtggacaagtcccggtggcagcagggcaacgtgttctcctgcagcgtgatgcacgaggccctgcacaaccactacacccagaagtccctgtccctgagccctggcaagtga

SEQ ID NO: 204 - DNA, 1386 bp, Artificial Sequence
  Synthetic polynucleotide
atggcagccggaacagcagttggagcctgggtgctggtcctcagtctgtggggcgctgtggtgggcgcccagcagatcaccgcccggatcggcgagcctctggtgctgaagtgcaagggcgctcctaagaagcctcctcagcggctcgagtggaagctgaacaccggccggaccgaggcctggaaggtgctgtctcctcagggcggaggaccttgggactccgtggcccgggtgctgcctcagggctccctgttcctgcctgccgtgggcatccaggacgagggcatcttcaggtgccaggccatgaaccggaacggcaaagaaaccaagtccaactacagagtgcgggtgtaccagatccctggcaagcctgagatcgtggactccgcctccgagctgaccgctggcgtgcctaacaaggtcggcacctgcgtgtccgagggctcctaccctgccggcaccctgtcctggcatctggacggcaagcccctggtgcctaacgagaagggcgtgtccgtgaaggaacagaccaggcggcaccctgagaccggcctgttcaccctgcagtccgagctgatggtgacccctgccagaggcggcgaccctcggcctaccttctcctgctccttctcccctggcctgcctcggcaccgggccctgcggaccgcccctatccagcctagagtgtgggagcctgtgcctctcgaggaagtgcagctggtcgtggagcctgagggcggagccgtggcccctccttccgtgttcctgttccctcctaagcctaaggacaccctgatgatctcccggacccctgaggtgacctgcgtggtggtggacgtgtcccacgaggatcctgaggtgaagttcaactggtacgtggacggcgtggaggtgcacaacgccaagaccaagcctcgggaggaacagtacaactccacctaccgggtggtgtccgtgctgaccgtgctgcaccaggactggctgaatggcaaagaatacaagtgcaaggtctccaacaaggccctgcctgcccctatcgagaaaaccatctccaaggccaagggccagcccagagagcctcaggtctacaccctgcctccctcccgggacgagctgaccaagaaccaggtgtccctgacctgcctggtgaagggcttctacccttccgacatcgccgtggagtgggagtccaacggccagcctgagaacaactacaagaccacccctcctgtgctggactccgacggctccttcttcctgtactccaagctgaccgtggacaagtcccggtggcagcagggcaacgtgttctcctgcagcgtgatgcacgaggccctgcacaaccactacacccagaagtccctgtccctgagccctggcaagtga

SEQ ID NO: 205 - DNA, 1386 bp, Artificial Sequence
  Synthetic polynucleotide
atggcagccggaacagcagttggagcctgggtgctggtcctcagtctgtggggcgctgtggtgggcgcccagaacatcaccgcccggatcggcgagcctctggtgctgaagtgcaagggcgctcctaagaagcctcctcagcggctcgagtggaagctgaacaccggccggaccgaggcctggaaggtgctgtctcctcagggcggaggaccttgggactccgtggcccgggtgctgcctaacggctccctgttcctgcctgccgtgggcatccaggacgagggcatcttcaggtgccaggccatgaaccggaacggcaaagaaaccaagtccaactacagagtgcgggtgtaccagatccctggcaagcctgagatcgtggactccgcctccgagctgaccgctggcgtgcctaacaaggtcggcacctgcgtgtccgagggctcctaccctgccggcaccctgtcctggcatctggacggcaagcccctggtgcctaacgagaagggcgtgtccgtgaaggaacagaccaggcggcaccctgagaccggcctgttcaccctgcagtccgagctgatggtgacccctgccagaggcggcgaccctcggcctaccttctcctgctccttctcccctggcctgcctcggcacgcggccctgcggaccgcccctatccagcctagagtgtgggagcctgtgcctctcgaggaagtgcagctggtcgtggagcctgagggcggagccgtggcccctccttccgtgttcctgttccctcctaagcctaaggacaccctgatgatctcccggacccctgaggtgacctgcgtggtggtggacgtgtcccacgaggatcctgaggtgaagttcaactggtacgtggacggcgtggaggtgcacaacgccaagaccaagcctcgggaggaacagtacaactccacctaccgggtggtgtccgtgctgaccgtgctgcaccaggactggctgaatggcaaagaatacaagtgcaaggtctccaacaaggccctgcctgcccctatcgagaaaaccatctccaaggccaagggccagcccagagagcctcaggtctacaccctgcctccctcccgggacgagctgaccaagaaccaggtgtccctgacctgcctggtgaagggcttctacccttccgacatcgccgtggagtgggagtccaacggccagcctgagaacaactacaagaccacccctcctgtgctggactccgacggctccttcttcctgtactccaagctgaccgtggacaagtcccggtggcagcagggcaacgtgttctcctgcagcgtgatgcacgaggccctgcacaaccactacacccagaagtccctgtccctgagccctggcaagtga

SEQ ID NO: 206 - DNA, 1386 bp, Artificial Sequence
  Synthetic polynucleotide
atggcagccggaacagcagttggagcctgggtgctggtcctcagtctgtggggcgctgtggtgggcgcccagaacatcaccgcccggatcggcgagcctctggtgctgaagtgcaagggcgctcctaagaagcctcctcagcggctcgagtggaagctgaacaccggccggaccgaggcctggaaggtgctgtctcctcagggcggaggaccttgggactccgtggcccgggtgctgcctaacggctccctgttcctgcctgccgtgggcatccaggacgagggcatcttcaggtgccaggccatgaaccggaacggcaaagaaaccaagtccaactacagagtgcgggtgtaccagatccctggcaagcctgagatcgtggactccgcctccgagctgaccgctggcgtgcctaacaaggtcggcacctgcgtgtccgagggctcctaccctgccggcaccctgtcctggcatctggacggcaagcccctggtgcctaacgagaagggcgtgtccgtgaaggaacagaccaggcggcaccctgagaccggcctgttcaccctgcagtccgagctgatggtgacccctgccagaggcggcgaccctcggcctaccttctcctgctccttctcccctggcctgcctcggcacaaggccctgcggaccgcccctatccagcctagagtgtgggagcctgtgcctctcgaggaagtgcagctggtcgtggagcctgagggcggagccgtggcccctccttccgtgttcctgttccctcctaagcctaaggacaccctgatgatctcccggacccctgaggtgacctgcgtggtggtggacgtgtcccacgaggatcctgaggtgaagttcaactggtacgtggacggcgtggaggtgcacaacgccaagaccaagcctcgggaggaacagtacaactccacctaccgggtggtgtccgtgctgaccgtgctgcaccaggactggctgaatggcaaagaatacaagtgcaaggtctccaacaaggccctgcctgcccctatcgagaaaaccatctccaaggccaagggccagcccagagagcctcaggtctacaccctgcctccctcccgggacgagctgaccaagaaccaggtgtccctgacctgcctggtgaagggcttctacccttccgacatcgccgtggagtgggagtccaacggccagcctgagaacaactacaagaccacccctcctgtgctggactccgacggctccttcttcctgtactccaagctgaccgtggacaagtcccggtggcagcagggcaacgtgttctcctgcagcgtgatgcacgaggccctgcacaaccactacacccagaagtccctgtccctgagccctggcaagtga

SEQ ID NO: 207 - DNA, 1386 bp, Artificial Sequence
  Synthetic polynucleotide
atggcagccggaacagcagttggagcctgggtgctggtcctcagtctgtggggcgctgtggtgggcgcccagaacatcaccgcccggatcggcgagcctctggtgctgaagtgcaagggcgctcctaagaagcctcctcagcggctcgagtggaagctgaacaccggccggaccgaggcctggaaggtgctgtctcctcagggcggaggaccttgggactccgtggcccgggtgctgcctaacggctccctgttcctgcctgccgtgggcatccaggacgagggcatcttcaggtgccaggccatgaaccggaacggcaaagaaaccaagtccaactacagagtgcgggtgtaccagatccctggcaagcctgagatcgtggactccgcctccgagctgaccgctggcgtgcctaacaaggtcggcacctgcgtgtccgagggctcctaccctgccggcaccctgtcctggcatctggacggcaagcccctggtgcctaacgagaagggcgtgtccgtgaaggaacagaccaggcggcaccctgagaccggcctgttcaccctgcagtccgagctgatggtgacccctgccagaggcggcgaccctcggcctaccttctcctgctccttctcccctggcctgcctcggcaccgggccctggcgaccgcccctatccagcctagagtgtgggagcctgtgcctctcgaggaagtgcagctggtcgtggagcctgagggcggagccgtggcccctccttccgtgttcctgttccctcctaagcctaaggacaccctgatgatctcccggacccctgaggtgacctgcgtggtggtggacgtgtcccacgaggatcctgaggtgaagttcaactggtacgtggacggcgtggaggtgcacaacgccaagaccaagcctcgggaggaacagtacaactccacctaccgggtggtgtccgtgctgaccgtgctgcaccaggactggctgaatggcaaagaatacaagtgcaaggtctccaacaaggccctgcctgcccctatcgagaaaaccatctccaaggccaagggccagcccagagagcctcaggtctacaccctgcctccctcccgggacgagctgaccaagaaccaggtgtccctgacctgcctggtgaagggcttctacccttccgacatcgccgtggagtgggagtccaacggccagcctgagaacaactacaagaccacccctcctgtgctggactccgacggctccttcttcctgtactccaagctgaccgtggacaagtcccggtggcagcagggcaacgtgttctcctgcagcgtgatgcacgaggccctgcacaaccactacacccagaagtccctgtccctgagccctggcaagtga

SEQ ID NO: 208 - DNA, 1386 bp, Artificial Sequence
  Synthetic polynucleotide
atggcagccggaacagcagttggagcctgggtgctggtcctcagtctgtggggcgctgtggtgggcgcccagaacatcaccgcccggatcggcgagcctctggtgctgaagtgcaagggcgctcctaagaagcctcctcagcggctcgagtggaagctgaacaccggccggaccgaggcctggaaggtgctgtctcctcagggcggaggaccttgggactccgtggcccgggtgctgcctaacggctccctgttcctgcctgccgtgggcatccaggacgagggcatcttcaggtgccaggccatgaaccggaacggcaaagaaaccaagtccaactacagagtgcgggtgtaccagatccctggcaagcctgagatcgtggactccgcctccgagctgaccgctggcgtgcctaacaaggtcggcacctgcgtgtccgagggctcctaccctgccggcaccctgtcctggcatctggacggcaagcccctggtgcctaacgagaagggcgtgtccgtgaaggaacagaccaggcggcaccctgagaccggcctgttcaccctgcagtccgagctgatggtgacccctgccagaggcggcgaccctcggcctaccttctcctgctccttctcccctggcctgcctcggcaccgggccctgaagaccgcccctatccagcctagagtgtgggagcctgtgcctctcgaggaagtgcagctggtcgtggagcctgagggcggagccgtggcccctccttccgtgttcctgttccctcctaagcctaaggacaccctgatgatctcccggacccctgaggtgacctgcgtggtggtggacgtgtcccacgaggatcctgaggtgaagttcaactggtacgtggacggcgtggaggtgcacaacgccaagaccaagcctcgggaggaacagtacaactccacctaccgggtggtgtccgtgctgaccgtgctgcaccaggactggctgaatggcaaagaatacaagtgcaaggtctccaacaaggccctgcctgcccctatcgagaaaaccatctccaaggccaagggccagcccagagagcctcaggtctacaccctgcctccctcccgggacgagctgaccaagaaccaggtgtccctgacctgcctggtgaagggcttctacccttccgacatcgccgtggagtgggagtccaacggccagcctgagaacaactacaagaccacccctcctgtgctggactccgacggctccttcttcctgtactccaagctgaccgtggacaagtcccggtggcagcagggcaacgtgttctcctgcagcgtgatgcacgaggccctgcacaaccactacacccagaagtccctgtccctgagccctggcaagtga

SEQ ID NO: 209 - DNA, 1386 bp, Artificial Sequence
  Synthetic polynucleotide
atggcagccggaacagcagttggagcctgggtgctggtcctcagtctgtggggcgctgtggtgggcgcccagaacatcaccgcccggatcggcgagcctctggtgctgaagtgcaagggcgctcctaagaagcctcctcagcggctcgagtggaagctgaacaccggccggaccgaggcctggaaggtgctgtctcctcagggcggaggaccttgggactccgtggcccgggtgctgcctaacggctccctgttcctgcctgccgtgggcatccaggacgagggcatcttcaggtgccaggccatgaaccggaacggcaaagaaaccaagtccaactacagagtgcgggtgtaccagatccctggcaagcctgagatcgtggactccgcctccgagctgaccgctggcgtgcctaacaaggtcggcacctgcgtgtccgagggctcctaccctgccggcaccctgtcctggcatctggacggcaagcccctggtgcctaacgagaagggcgtgtccgtgaaggaacagaccaggcggcaccctgagaccggcctgttcaccctgcagtccgagctgatggtgacccctgccagaggcggcgaccctcggcctaccttctcctgctccttctcccctggcctgcctcggcaccgggccctgcataccgcccctatccagcctagagtgtgggagcctgtgcctctcgaggaagtgcagctggtcgtggagcctgagggcggagccgtggcccctccttccgtgttcctgttccctcctaagcctaaggacaccctgatgatctcccggacccctgaggtgacctgcgtggtggtggacgtgtcccacgaggatcctgaggtgaagttcaactggtacgtggacggcgtggaggtgcacaacgccaagaccaagcctcgggaggaacagtacaactccacctaccgggtggtgtccgtgctgaccgtgctgcaccaggactggctgaatggcaaagaatacaagtgcaaggtctccaacaaggccctgcctgcccctatcgagaaaaccatctccaaggccaagggccagcccagagagcctcaggtctacaccctgcctccctcccgggacgagctgaccaagaaccaggtgtccctgacctgcctggtgaagggcttctacccttccgacatcgccgtggagtgggagtccaacggccagcctgagaacaactacaagaccacccctcctgtgctggactccgacggctccttcttcctgtactccaagctgaccgtggacaagtcccggtggcagcagggcaacgtgttctcctgcagcgtgatgcacgaggccctgcacaaccactacacccagaagtccctgtccctgagccctggcaagtga

SEQ ID NO: 210 - DNA, 1386 bp, Artificial Sequence
  Synthetic polynucleotide
atggcagccggaacagcagttggagcctgggtgctggtcctcagtctgtggggcgctgtggtgggcgcccagaacatcaccgcccggatcggcgagcctctggtgctgaagtgcaagggcgctcctaagaagcctcctcagcggctcgagtggaagctgaacaccggccggaccgaggcctggaaggtgctgtctcctcagggcggaggaccttgggactccgtggcccgggtgctgcctaacggctccctgttcctgcctgccgtgggcatccaggacgagggcatcttcaggtgccaggccatgaaccggaacggcaaagaaaccaagtccaactacagagtgcgggtgtaccagatccctggcaagcctgagatcgtggactccgcctccgagctgaccgctggcgtgcctaacaaggtcggcacctgcgtgtccgagggctcctaccctgccggcaccctgtcctggcatctggacggcaagcccctggtgcctaacgagaagggcgtgtccgtgaaggaacagaccaggcggcaccctgagaccggcctgttcaccctgcagtccgagctgatggtgacccctgccagaggcggcgaccctcggcctaccttctcctgctccttctcccctggcctgcctcggcaccgggccctgacgaccgcccctatccagcctagagtgtgggagcctgtgcctctcgaggaagtgcagctggtcgtggagcctgagggcggagccgtggcccctccttccgtgttcctgttccctcctaagcctaaggacaccctgatgatctcccggacccctgaggtgacctgcgtggtggtggacgtgtcccacgaggatcctgaggtgaagttcaactggtacgtggacggcgtggaggtgcacaacgccaagaccaagcctcgggaggaacagtacaactccacctaccgggtggtgtccgtgctgaccgtgctgcaccaggactggctgaatggcaaagaatacaagtgcaaggtctccaacaaggccctgcctgcccctatcgagaaaaccatctccaaggccaagggccagcccagagagcctcaggtctacaccctgcctccctcccgggacgagctgaccaagaaccaggtgtccctgacctgcctggtgaagggcttctacccttccgacatcgccgtggagtgggagtccaacggccagcctgagaacaactacaagaccacccctcctgtgctggactccgacggctccttcttcctgtactccaagctgaccgtggacaagtcccggtggcagcagggcaacgtgttctcctgcagcgtgatgcacgaggccctgcacaaccactacacccagaagtccctgtccctgagccctggcaagtga

SEQ ID NO: 211 - DNA, 1386 bp, Artificial Sequence
  Synthetic polynucleotide
atggcagccggaacagcagttggagcctgggtgctggtcctcagtctgtggggcgctgtggtgggcgcccagcagatcaccgcccggatcggcgagcctctggtgctgaagtgcaagggcgctcctaagaagcctcctcagcggctcgagtggaagctgaacaccggccggaccgaggcctggaaggtgctgtctcctcagggcggaggaccttgggactccgtggcccgggtgctgcctaacggctccctgttcctgcctgccgtgggcatccaggacgagggcatcttcaggtgccaggccatgaaccggaacggcaaagaaaccaagtccaactacagagtgcgggtgtaccagatccctggcaagcctgagatcgtggactccgcctccgagctgaccgctggcgtgcctaacaaggtcggcacctgcgtgtccgagggctcctaccctgccggcaccctgtcctggcatctggacggcaagcccctggtgcctaacgagaagggcgtgtccgtgaaggaacagaccaggcggcaccctgagaccggcctgttcaccctgcagtccgagctgatggtgacccctgccagaggcggcgaccctcggcctaccttctcctgctccttctcccctggcctgcctcggcaccgggccctggcgaccgcccctatccagcctagagtgtgggagcctgtgcctctcgaggaagtgcagctggtcgtggagcctgagggcggagccgtggcccctccttccgtgttcctgttccctcctaagcctaaggacaccctgatgatctcccggacccctgaggtgacctgcgtggtggtggacgtgtcccacgaggatcctgaggtgaagttcaactggtacgtggacggcgtggaggtgcacaacgccaagaccaagcctcgggaggaacagtacaactccacctaccgggtggtgtccgtgctgaccgtgctgcaccaggactggctgaatggcaaagaatacaagtgcaaggtctccaacaaggccctgcctgcccctatcgagaaaaccatctccaaggccaagggccagcccagagagcctcaggtctacaccctgcctccctcccgggacgagctgaccaagaaccaggtgtccctgacctgcctggtgaagggcttctacccttccgacatcgccgtggagtgggagtccaacggccagcctgagaacaactacaagaccacccctcctgtgctggactccgacggctccttcttcctgtactccaagctgaccgtggacaagtcccggtggcagcagggcaacgtgttctcctgcagcgtgatgcacgaggccctgcacaaccactacacccagaagtccctgtccctgagccctggcaagtga

SEQ ID NO: 212 - DNA, 1386 bp, Artificial Sequence
  Synthetic polynucleotide
atggcagccggaacagcagttggagcctgggtgctggtcctcagtctgtggggcgctgtggtgggcgcccagaacatcaccgcccggatcggcgagcctctggtgctgaagtgcaagggcgctcctaagaagcctcctcagcggctcgagtggaagctgaacaccggccggaccgaggcctggaaggtgctgtctcctcagggcggaggaccttgggactccgtggcccgggtgctgcctcagggctccctgttcctgcctgccgtgggcatccaggacgagggcatcttcaggtgccaggccatgaaccggaacggcaaagaaaccaagtccaactacagagtgcgggtgtaccagatccctggcaagcctgagatcgtggactccgcctccgagctgaccgctggcgtgcctaacaaggtcggcacctgcgtgtccgagggctcctaccctgccggcaccctgtcctggcatctggacggcaagcccctggtgcctaacgagaagggcgtgtccgtgaaggaacagaccaggcggcaccctgagaccggcctgttcaccctgcagtccgagctgatggtgacccctgccagaggcggcgaccctcggcctaccttctcctgctccttctcccctggcctgcctcggcaccgggccctggcgaccgcccctatccagcctagagtgtgggagcctgtgcctctcgaggaagtgcagctggtcgtggagcctgagggcggagccgtggcccctccttccgtgttcctgttccctcctaagcctaaggacaccctgatgatctcccggacccctgaggtgacctgcgtggtggtggacgtgtcccacgaggatcctgaggtgaagttcaactggtacgtggacggcgtggaggtgcacaacgccaagaccaagcctcgggaggaacagtacaactccacctaccgggtggtgtccgtgctgaccgtgctgcaccaggactggctgaatggcaaagaatacaagtgcaaggtctccaacaaggccctgcctgcccctatcgagaaaaccatctccaaggccaagggccagcccagagagcctcaggtctacaccctgcctccctcccgggacgagctgaccaagaaccaggtgtccctgacctgcctggtgaagggcttctacccttccgacatcgccgtggagtgggagtccaacggccagcctgagaacaactacaagaccacccctcctgtgctggactccgacggctccttcttcctgtactccaagctgaccgtggacaagtcccggtggcagcagggcaacgtgttctcctgcagcgtgatgcacgaggccctgcacaaccactacacccagaagtccctgtccctgagccctggcaagtga

SEQ ID NO: 213 - DNA, 1386 bp, Artificial Sequence
  Synthetic polynucleotide
atggcagccggaacagcagttggagcctgggtgctggtcctcagtctgtggggcgctgtggtgggcgcccagcagatcaccgcccggatcggcgagcctctggtgctgaagtgcaagggcgctcctaagaagcctcctcagcggctcgagtggaagctgaacaccggccggaccgaggcctggaaggtgctgtctcctcagggcggaggaccttgggactccgtggcccgggtgctgcctcagggctccctgttcctgcctgccgtgggcatccaggacgagggcatcttcaggtgccaggccatgaaccggaacggcaaagaaaccaagtccaactacagagtgcgggtgtaccagatccctggcaagcctgagatcgtggactccgcctccgagctgaccgctggcgtgcctaacaaggtcggcacctgcgtgtccgagggctcctaccctgccggcaccctgtcctggcatctggacggcaagcccctggtgcctaacgagaagggcgtgtccgtgaaggaacagaccaggcggcaccctgagaccggcctgttcaccctgcagtccgagctgatggtgacccctgccagaggcggcgaccctcggcctaccttctcctgctccttctcccctggcctgcctcggcaccgggccctggcgaccgcccctatccagcctagagtgtgggagcctgtgcctctcgaggaagtgcagctggtcgtggagcctgagggcggagccgtggcccctccttccgtgttcctgttccctcctaagcctaaggacaccctgatgatctcccggacccctgaggtgacctgcgtggtggtggacgtgtcccacgaggatcctgaggtgaagttcaactggtacgtggacggcgtggaggtgcacaacgccaagaccaagcctcgggaggaacagtacaactccacctaccgggtggtgtccgtgctgaccgtgctgcaccaggactggctgaatggcaaagaatacaagtgcaaggtctccaacaaggccctgcctgcccctatcgagaaaaccatctccaaggccaagggccagcccagagagcctcaggtctacaccctgcctccctcccgggacgagctgaccaagaaccaggtgtccctgacctgcctggtgaagggcttctacccttccgacatcgccgtggagtgggagtccaacggccagcctgagaacaactacaagaccacccctcctgtgctggactccgacggctccttcttcctgtactccaagctgaccgtggacaagtcccggtggcagcagggcaacgtgttctcctgcagcgtgatgcacgaggccctgcacaaccactacacccagaagtccctgtccctgagccctggcaagtga

SEQ ID NO: 214 - DNA, 1386 bp, Artificial Sequence
  Synthetic polynucleotide
atggcagccggaacagcagttggagcctgggtgctggtcctcagtctgtggggcgctgtggtgggcgcccagaacatcaccgcccggatcggcgagcctctggtgctgaagtgcaagggcgctcctaagaagcctcctcagcggctcgagtggaagctgaacaccggccggaccgaggcctggaaggtgctgtctcctcagggcggaggaccttgggactccgtggcccgggtgctgcctaacggctccctgttcctgcctgccgtgggcatccaggacgagggcatcttcaggtgccaggccatgaaccggaacggcaaagaaaccaagtccaactacagagtgcgggtgtaccagatccctggcaagcctgagatcgtggactccgcctccgagctgaccgctggcgtgcctaacaaggtcggcacctgcgtgtccgagggctcctaccctgccggcaccctgtcctggcatctggacggcaagcccctggtgcctaacgagaagggcgtgtccgtgaaggaacagaccaggcggcaccctgagaccggcctgttcaccctgcagtccgagctgatggtgacccctgccagaggcggcgaccctcggcctaccttctcctgctccttctcccctggcctgcctcggcaccgggccctgcggaccgcccctatccagcctagagtgtgggagcctgtgcctctcgaggaagtgcagctggtcgtggagcctgagggcggagccgtggcccctccttccgtgttcctgttccctcctaagcctaaggacaccctgatgatctcccggacccctgaggtgacctgcgtggtggtggacgtgtcccacgaggatcctgaggtgaagttcaactggtacgtggacggcgtggaggtgcacaacgccaagaccaagcctcgggaggaacagtaccagtccacctaccgggtggtgtccgtgctgaccgtgctgcaccaggactggctgaatggcaaagaatacaagtgcaaggtctccaacaaggccctgcctgcccctatcgagaaaaccatctccaaggccaagggccagcccagagagcctcaggtctacaccctgcctccctcccgggacgagctgaccaagaaccaggtgtccctgacctgcctggtgaagggcttctacccttccgacatcgccgtggagtgggagtccaacggccagcctgagaacaactacaagaccacccctcctgtgctggactccgacggctccttcttcctgtactccaagctgaccgtggacaagtcccggtggcagcagggcaacgtgttctcctgcagcgtgatgcacgaggccctgcacaaccactacacccagaagtccctgtccctgagccctggcaagtga

SEQ ID NO: 215 - DNA, 1386 bp, Artificial Sequence
  Synthetic polynucleotide
atggcagccggaacagcagttggagcctgggtgctggtcctcagtctgtggggcgctgtggtgggcgcccagcagatcaccgcccggatcggcgagcctctggtgctgaagtgcaagggcgctcctaagaagcctcctcagcggctcgagtggaagctgaacaccggccggaccgaggcctggaaggtgctgtctcctcagggcggaggaccttgggactccgtggcccgggtgctgcctaacggctccctgttcctgcctgccgtgggcatccaggacgagggcatcttcaggtgccaggccatgaaccggaacggcaaagaaaccaagtccaactacagagtgcgggtgtaccagatccctggcaagcctgagatcgtggactccgcctccgagctgaccgctggcgtgcctaacaaggtcggcacctgcgtgtccgagggctcctaccctgccggcaccctgtcctggcatctggacggcaagcccctggtgcctaacgagaagggcgtgtccgtgaaggaacagaccaggcggcaccctgagaccggcctgttcaccctgcagtccgagctgatggtgacccctgccagaggcggcgaccctcggcctaccttctcctgctccttctcccctggcctgcctcggcaccgggccctgcggaccgcccctatccagcctagagtgtgggagcctgtgcctctcgaggaagtgcagctggtcgtggagcctgagggcggagccgtggcccctccttccgtgttcctgttccctcctaagcctaaggacaccctgatgatctcccggacccctgaggtgacctgcgtggtggtggacgtgtcccacgaggatcctgaggtgaagttcaactggtacgtggacggcgtggaggtgcacaacgccaagaccaagcctcgggaggaacagtaccagtccacctaccgggtggtgtccgtgctgaccgtgctgcaccaggactggctgaatggcaaagaatacaagtgcaaggtctccaacaaggccctgcctgcccctatcgagaaaaccatctccaaggccaagggccagcccagagagcctcaggtctacaccctgcctccctcccgggacgagctgaccaagaaccaggtgtccctgacctgcctggtgaagggcttctacccttccgacatcgccgtggagtgggagtccaacggccagcctgagaacaactacaagaccacccctcctgtgctggactccgacggctccttcttcctgtactccaagctgaccgtggacaagtcccggtggcagcagggcaacgtgttctcctgcagcgtgatgcacgaggccctgcacaaccactacacccagaagtccctgtccctgagccctggcaagtga

SEQ ID NO: 216 - DNA, 1386 bp, Artificial Sequence
  Synthetic polynucleotide
atggcagccggaacagcagttggagcctgggtgctggtcctcagtctgtggggcgctgtggtgggcgcccagaacatcaccgcccggatcggcgagcctctggtgctgaagtgcaagggcgctcctaagaagcctcctcagcggctcgagtggaagctgaacaccggccggaccgaggcctggaaggtgctgtctcctcagggcggaggaccttgggactccgtggcccgggtgctgcctcagggctccctgttcctgcctgccgtgggcatccaggacgagggcatcttcaggtgccaggccatgaaccggaacggcaaagaaaccaagtccaactacagagtgcgggtgtaccagatccctggcaagcctgagatcgtggactccgcctccgagctgaccgctggcgtgcctaacaaggtcggcacctgcgtgtccgagggctcctaccctgccggcaccctgtcctggcatctggacggcaagcccctggtgcctaacgagaagggcgtgtccgtgaaggaacagaccaggcggcaccctgagaccggcctgttcaccctgcagtccgagctgatggtgacccctgccagaggcggcgaccctcggcctaccttctcctgctccttctcccctggcctgcctcggcaccgggccctgcggaccgcccctatccagcctagagtgtgggagcctgtgcctctcgaggaagtgcagctggtcgtggagcctgagggcggagccgtggcccctccttccgtgttcctgttccctcctaagcctaaggacaccctgatgatctcccggacccctgaggtgacctgcgtggtggtggacgtgtcccacgaggatcctgaggtgaagttcaactggtacgtggacggcgtggaggtgcacaacgccaagaccaagcctcgggaggaacagtaccagtccacctaccgggtggtgtccgtgctgaccgtgctgcaccaggactggctgaatggcaaagaatacaagtgcaaggtctccaacaaggccctgcctgcccctatcgagaaaaccatctccaaggccaagggccagcccagagagcctcaggtctacaccctgcctccctcccgggacgagctgaccaagaaccaggtgtccctgacctgcctggtgaagggcttctacccttccgacatcgccgtggagtgggagtccaacggccagcctgagaacaactacaagaccacccctcctgtgctggactccgacggctccttcttcctgtactccaagctgaccgtggacaagtcccggtggcagcagggcaacgtgttctcctgcagcgtgatgcacgaggccctgcacaaccactacacccagaagtccctgtccctgagccctggcaagtga

SEQ ID NO: 217 - DNA, 1386 bp, Artificial Sequence
  Synthetic polynucleotide
atggcagccggaacagcagttggagcctgggtgctggtcctcagtctgtggggcgctgtggtgggcgcccagcagatcaccgcccggatcggcgagcctctggtgctgaagtgcaagggcgctcctaagaagcctcctcagcggctcgagtggaagctgaacaccggccggaccgaggcctggaaggtgctgtctcctcagggcggaggaccttgggactccgtggcccgggtgctgcctcagggctccctgttcctgcctgccgtgggcatccaggacgagggcatcttcaggtgccaggccatgaaccggaacggcaaagaaaccaagtccaactacagagtgcgggtgtaccagatccctggcaagcctgagatcgtggactccgcctccgagctgaccgctggcgtgcctaacaaggtcggcacctgcgtgtccgagggctcctaccctgccggcaccctgtcctggcatctggacggcaagcccctggtgcctaacgagaagggcgtgtccgtgaaggaacagaccaggcggcaccctgagaccggcctgttcaccctgcagtccgagctgatggtgacccctgccagaggcggcgaccctcggcctaccttctcctgctccttctcccctggcctgcctcggcaccgggccctgcggaccgcccctatccagcctagagtgtgggagcctgtgcctctcgaggaagtgcagctggtcgtggagcctgagggcggagccgtggcccctccttccgtgttcctgttccctcctaagcctaaggacaccctgatgatctcccggacccctgaggtgacctgcgtggtggtggacgtgtcccacgaggatcctgaggtgaagttcaactggtacgtggacggcgtggaggtgcacaacgccaagaccaagcctcgggaggaacagtaccagtccacctaccgggtggtgtccgtgctgaccgtgctgcaccaggactggctgaatggcaaagaatacaagtgcaaggtctccaacaaggccctgcctgcccctatcgagaaaaccatctccaaggccaagggccagcccagagagcctcaggtctacaccctgcctccctcccgggacgagctgaccaagaaccaggtgtccctgacctgcctggtgaagggcttctacccttccgacatcgccgtggagtgggagtccaacggccagcctgagaacaactacaagaccacccctcctgtgctggactccgacggctccttcttcctgtactccaagctgaccgtggacaagtcccggtggcagcagggcaacgtgttctcctgcagcgtgatgcacgaggccctgcacaaccactacacccagaagtccctgtccctgagccctggcaagtga

SEQ ID NO: 218 - DNA, 1386 bp, Artificial Sequence
  Synthetic polynucleotide
atggcagccggaacagcagttggagcctgggtgctggtcctcagtctgtggggcgctgtggtgggcgcccagcagatcaccgcccggatcggcgagcctctggtgctgaagtgcaagggcgctcctaagaagcctcctcagcggctcgagtggaagctgaacaccggccggaccgaggcctggaaggtgctgtctcctcagggcggaggaccttgggactccgtggcccgggtgctgcctaacggctccctgttcctgcctgccgtgggcatccaggacgagggcatcttcaggtgccaggccatgaaccggaacggcaaagaaaccaagtccaactacagagtgcgggtgtaccagatccctggcaagcctgagatcgtggactccgcctccgagctgaccgctggcgtgcctaacaaggtcggcacctgcgtgtccgagggctcctaccctgccggcaccctgtcctggcatctggacggcaagcccctggtgcctaacgagaagggcgtgtccgtgaaggaacagaccaggcggcaccctgagaccggcctgttcaccctgcagtccgagctgatggtgacccctgccagaggcggcgaccctcggcctaccttctcctgctccttctcccctggcctgcctcggcaccgggccctggcgaccgcccctatccagcctagagtgtgggagcctgtgcctctcgaggaagtgcagctggtcgtggagcctgagggcggagccgtggcccctccttccgtgttcctgttccctcctaagcctaaggacaccctgatgatctcccggacccctgaggtgacctgcgtggtggtggacgtgtcccacgaggatcctgaggtgaagttcaactggtacgtggacggcgtggaggtgcacaacgccaagaccaagcctcgggaggaacagtaccagtccacctaccgggtggtgtccgtgctgaccgtgctgcaccaggactggctgaatggcaaagaatacaagtgcaaggtctccaacaaggccctgcctgcccctatcgagaaaaccatctccaaggccaagggccagcccagagagcctcaggtctacaccctgcctccctcccgggacgagctgaccaagaaccaggtgtccctgacctgcctggtgaagggcttctacccttccgacatcgccgtggagtgggagtccaacggccagcctgagaacaactacaagaccacccctcctgtgctggactccgacggctccttcttcctgtactccaagctgaccgtggacaagtcccggtggcagcagggcaacgtgttctcctgcagcgtgatgcacgaggccctgcacaaccactacacccagaagtccctgtccctgagccctggcaagtga

SEQ ID NO: 219 - DNA, 1386 bp, Artificial Sequence
  Synthetic polynucleotide
atggcagccggaacagcagttggagcctgggtgctggtcctcagtctgtggggcgctgtggtgggcgcccagaacatcaccgcccggatcggcgagcctctggtgctgaagtgcaagggcgctcctaagaagcctcctcagcggctcgagtggaagctgaacaccggccggaccgaggcctggaaggtgctgtctcctcagggcggaggaccttgggactccgtggcccgggtgctgcctcagggctccctgttcctgcctgccgtgggcatccaggacgagggcatcttcaggtgccaggccatgaaccggaacggcaaagaaaccaagtccaactacagagtgcgggtgtaccagatccctggcaagcctgagatcgtggactccgcctccgagctgaccgctggcgtgcctaacaaggtcggcacctgcgtgtccgagggctcctaccctgccggcaccctgtcctggcatctggacggcaagcccctggtgcctaacgagaagggcgtgtccgtgaaggaacagaccaggcggcaccctgagaccggcctgttcaccctgcagtccgagctgatggtgacccctgccagaggcggcgaccctcggcctaccttctcctgctccttctcccctggcctgcctcggcaccgggccctggcgaccgcccctatccagcctagagtgtgggagcctgtgcctctcgaggaagtgcagctggtcgtggagcctgagggcggagccgtggcccctccttccgtgttcctgttccctcctaagcctaaggacaccctgatgatctcccggacccctgaggtgacctgcgtggtggtggacgtgtcccacgaggatcctgaggtgaagttcaactggtacgtggacggcgtggaggtgcacaacgccaagaccaagcctcgggaggaacagtaccagtccacctaccgggtggtgtccgtgctgaccgtgctgcaccaggactggctgaatggcaaagaatacaagtgcaaggtctccaacaaggccctgcctgcccctatcgagaaaaccatctccaaggccaagggccagcccagagagcctcaggtctacaccctgcctccctcccgggacgagctgaccaagaaccaggtgtccctgacctgcctggtgaagggcttctacccttccgacatcgccgtggagtgggagtccaacggccagcctgagaacaactacaagaccacccctcctgtgctggactccgacggctccttcttcctgtactccaagctgaccgtggacaagtcccggtggcagcagggcaacgtgttctcctgcagcgtgatgcacgaggccctgcacaaccactacacccagaagtccctgtccctgagccctggcaagtga

SEQ ID NO: 220 - DNA, 1386 bp, Artificial Sequence
  Synthetic polynucleotide
atggcagccggaacagcagttggagcctgggtgctggtcctcagtctgtggggcgctgtggtgggcgcccagcagatcaccgcccggatcggcgagcctctggtgctgaagtgcaagggcgctcctaagaagcctcctcagcggctcgagtggaagctgaacaccggccggaccgaggcctggaaggtgctgtctcctcagggcggaggaccttgggactccgtggcccgggtgctgcctcagggctccctgttcctgcctgccgtgggcatccaggacgagggcatcttcaggtgccaggccatgaaccggaacggcaaagaaaccaagtccaactacagagtgcgggtgtaccagatccctggcaagcctgagatcgtggactccgcctccgagctgaccgctggcgtgcctaacaaggtcggcacctgcgtgtccgagggctcctaccctgccggcaccctgtcctggcatctggacggcaagcccctggtgcctaacgagaagggcgtgtccgtgaaggaacagaccaggcggcaccctgagaccggcctgttcaccctgcagtccgagctgatggtgacccctgccagaggcggcgaccctcggcctaccttctcctgctccttctcccctggcctgcctcggcaccgggccctggcgaccgcccctatccagcctagagtgtgggagcctgtgcctctcgaggaagtgcagctggtcgtggagcctgagggcggagccgtggcccctccttccgtgttcctgttccctcctaagcctaaggacaccctgatgatctcccggacccctgaggtgacctgcgtggtggtggacgtgtcccacgaggatcctgaggtgaagttcaactggtacgtggacggcgtggaggtgcacaacgccaagaccaagcctcgggaggaacagtaccagtccacctaccgggtggtgtccgtgctgaccgtgctgcaccaggactggctgaatggcaaagaatacaagtgcaaggtctccaacaaggccctgcctgcccctatcgagaaaaccatctccaaggccaagggccagcccagagagcctcaggtctacaccctgcctccctcccgggacgagctgaccaagaaccaggtgtccctgacctgcctggtgaagggcttctacccttccgacatcgccgtggagtgggagtccaacggccagcctgagaacaactacaagaccacccctcctgtgctggactccgacggctccttcttcctgtactccaagctgaccgtggacaagtcccggtggcagcagggcaacgtgttctcctgcagcgtgatgcacgaggccctgcacaaccactacacccagaagtccctgtccctgagccctggcaagtga

SEQ ID NO: 221 - DNA, 1314 bp, Artificial Sequence
  Synthetic polynucleotide
caaaacatcacagcccggattggcgagccactggtgctgaagtgtaagggggcccccaagaaaccaccccagcggctggaatggaaactgaacacaggccggacagaggcttggaaggtcctgtctccccagggaggaggcccctgggacagtgtggctcgtgtccttcccaacggctccctcttccttccggctgtcgggatccaggatgaggggattttccggtgccaggcaatgaacaggaatggaaaggagaccaagtccaactaccgagtccgtgtctaccagattcctgggaagccagaaattgtagattctgcctctgaactcacggctggtgttcccaataaggtggggacatgtgtgtcagaggggagctaccctgcagggactcttagctggcacttggatgggaagcccctggtgcctaatgagaagggagtatctgtgaaggaacagaccaggagacaccctgagacagggctcttcacactgcagtcggagctaatggtgaccccagcccggggaggagatccccgtcccaccttctcctgtagcttcagcccaggccttccccgacaccgggccttgcgcacagcccccatccagccccgtgtctgggagcctgtgcctctggaggaggtccaattggtggtggagccagaaggtggagcagtagctcctccgtcagtcttcctcttccccccaaaacccaaggacaccctcatgatctcccggacccctgaggtcacatgcgtggtggtggacgtgagccacgaagaccctgaggtcaagttcaactggtacgtggacggcgtggaggtgcataatgccaagacaaagccgcgggaggagcagtacaacagcacgtaccgtgtggtcagcgtcctcaccgtcctgcaccaggactggctgaatggcaaggagtacaagtgcaaggtctccaacaaagccctcccagcccccatcgagaaaaccatctccaaagccaaagggcagccccgagaaccacaggtgtacaccctgcccccatcccgggatgagctgaccaagaaccaggtcagcctgacctgcctggtcaaaggcttctatcccagcgacatcgccgtggagtgggagagcaatgggcagccggagaacaactacaagaccacgcctcccgtgctggactccgacggctccttcttcctctacagcaagctcaccgtggacaagagcaggtggcagcaggggaacgtcttctcatgctccgtgatgcatgaggctctgcacaaccactacacgcagaagagcctctccctgtctcccgggaaa

SEQ ID NO: 222 - DNA, 1314 bp, Artificial Sequence
  Synthetic polynucleotide
cagaacatcaccgcccggatcggcgagcctctggtgctgaagtgcaagggcgctcctaagaagcctcctcagcggctcgagtggaagctgaacaccggccggaccgaggcctggaaggtgctgtctcctcagggcggaggaccttgggactccgtggcccgggtgctgcctaacggctccctgttcctgcctgccgtgggcatccaggacgagggcatcttcaggtgccaggccatgaaccggaacggcaaagaaaccaagtccaactacagagtgcgggtgtaccagatccctggcaagcctgagatcgtggactccgcctccgagctgaccgctggcgtgcctaacaaggtcggcacctgcgtgtccgagggctcctaccctgccggcaccctgtcctggcatctggacggcaagcccctggtgcctaacgagaagggcgtgtccgtgaaggaacagaccaggcggcaccctgagaccggcctgttcaccctgcagtccgagctgatggtgacccctgccagaggcggcgaccctcggcctaccttctcctgctccttctcccctggcctgcctcggcaccgggccctgcggaccgcccctatccagcctagagtgtgggagcctgtgcctctcgaggaagtgcagctggtcgtggagcctgagggcggagccgtggcccctccttccgtgttcctgttccctcctaagcctaaggacaccctgatgatctcccggacccctgaggtgacctgcgtggtggtggacgtgtcccacgaggatcctgaggtgaagttcaactggtacgtggacggcgtggaggtgcacaacgccaagaccaagcctcgggaggaacagtacaactccacctaccgggtggtgtccgtgctgaccgtgctgcaccaggactggctgaatggcaaagaatacaagtgcaaggtctccaacaaggccctgcctgcccctatcgagaaaaccatctccaaggccaagggccagcccagagagcctcaggtctacaccctgcctccctcccgggacgagctgaccaagaaccaggtgtccctgacctgcctggtgaagggcttctacccttccgacatcgccgtggagtgggagtccaacggccagcctgagaacaactacaagaccacccctcctgtgctggactccgacggctccttcttcctgtactccaagctgaccgtggacaagtcccggtggcagcagggcaacgtgttctcctgcagcgtgatgcacgaggccctgcacaaccactacacccagaagtccctgtccctgagccctggcaag

SEQ ID NO: 223 - protein, 11 aa, Homo sapiens
PCPAPELLGGP

SEQ ID NO: 224 - protein, 10 aa, Homo sapiens
PCPAPELLGG

SEQ ID NO: 225 - protein, 323 aa, Artificial Sequence
  Synthetic polypeptide
QQITARIGEPLVLKCKGAPKKPPQRLEWKLNTGRTEAWKVLSPQGGGPWDSVARVLPQGSLFLPAVGIQDEGIFRCQAMNRNGKETKSNYRVRVYQIPGKPEIVDSASELTAGPSVFLFPPKPKDTLMISRTPEVTCVVVDVSHEDPEVKFNWYVDGVEVHNAKTKPREEQYQSTYRVVSVLTVLHQDWLNGKEYKCKVSNKALPAPIEKTISKAKGQPREPQVYTLPPSRDELTKNQVSLTCLVKGFYPSDIAVEWESNGQPENNYKTTPPVLDSDGSFFLYSKLTVDKSRWQQGNVFSCSVMHEALHNHYTQKSLSLSPGK

SEQ ID NO: 226 - protein, 7 aa, Artificial Sequence
  Synthetic polypeptide
PRHRALR

SEQ ID NO: 227 - protein, 7 aa, Artificial Sequence
  Synthetic polypeptide
PHRAALR

SEQ ID NO: 228 - protein, 7 aa, Artificial Sequence
  Synthetic polypeptide
PRHKALR

SEQ ID NO: 229 - protein, 7 aa, Artificial Sequence
  Synthetic polypeptide
PRHRALA

SEQ ID NO: 230 - protein, 7 aa, Artificial Sequence
  Synthetic polypeptide
PRHRALK

SEQ ID NO: 231 - protein, 7 aa, Artificial Sequence
  Synthetic polypeptide
PRHRALH

SEQ ID NO: 232 - protein, 7 aa, Artificial Sequence
  Synthetic polypeptide
PRHRALT
